(19) United States
(12) Patent Application Publication
(10) Pub. No.: US 2026/0028629 A1
(43) Pub. Date: Jan. 29, 2026

(54) AGENTS FOR MODULATING EXPRESSION

(71) Applicant: Kicho Inc., New York, NY (US)

(72) Inventors: Oliver S.C. Quigley, New York, NY (US); Ethan Perlstein, Oakland, CA (US)

(21) Appl. No.: 18/872,481

(22) PCT Filed: Jun. 7, 2023
(86) PCT No.: PCT/US2023/024700

§ 371 Date: Dec. 6, 2024

Related U.S. Application Data
(60) Provisional application No. 63/349,659, filed on Jun. 7, 2022.

(51) Int. Cl. C12N 15/113; A61K 31/712; A61K 31/7125

(52) U.S. Cl. CPC C12N 15/1137; A61K 31/712; A61K 31/7125; C12N 2310/11; C12N 2310/14; C12N 2310/315; C12N 2310/321; C12Y 203/02

(57) ABSTRACT

Agents that target a nucleic acid (e.g., processed mRNA) can modulate expression of a protein that is encoded by the nucleic acid, e.g., via modulation of the level of the nucleic acid. In aspects, provided herein are compositions, methods, kits, and systems related to agents that modulate protein expression by targeting a nucleic acid molecule that encodes the protein.

### CROSS-REFERENCE

[0001] This application is a national phase entry of International Application No. PCT/US2023/024700, filed Jun. 7, 2023, which claims the benefit of U.S. Provisional Application No. 63/349,659, filed Jun. 7, 2022, each of which is incorporated herein by reference in its entirety.

### SEQUENCE LISTING

[0002] The instant application contains a Sequence Listing which has been submitted electronically in XML format and is hereby incorporated by reference in its entirety. Said XML copy, created on Jul. 17, 2023, is named 60868-701_601_SL.xml and is 1,724,339 bytes in size.

### SUMMARY

[0003] Disclosed herein, in some aspects, is a method of reducing expression of a UBE3A protein in a mammalian cell having duplication, overexpression, or a gain-of-function mutation of a UBE3A gene that encodes the UBE3A protein, the method comprises contacting an agent or a vector encoding the agent to the mammalian cell, wherein the agent reduces a level of a processed mRNA encoding the UBE3A protein in the mammalian cell.

[0004] In some cases, the agent comprises a polynucleotide sequence that is at least 80% complementary to at least 8 contiguous nucleic acids of the sequence set forth in any one of SEQ ID NO: 93-120.

[0005] In some cases, the agent comprises a polynucleotide sequence that is at least 80% complementary to at least 8 contiguous nucleic acids of each mRNA transcript listed in Table 2.

[0006] In some cases, the agent comprises an antisense oligomer.

[0007] In some cases, the agent comprises an antisense oligomer with at least 80% identity to the sequence set forth in any one of SEQ ID NO: 1-92.

[0008] Disclosed herein, in some aspects, is a method of modulating expression of a UBE3A gene encoding a UBE3A protein in a mammalian cell, the method comprises contacting an agent or a vector encoding the agent to the mammalian cell, wherein the agent comprises a polynucleotide sequence that comprises an antisense oligomer with at least 80% identity to the sequence set forth in any one of SEQ ID NO: 1-92.

[0009] In some cases, the antisense oligomer comprises a backbone modification, a modified sugar moiety or a combination thereof.

[0010] In some cases, the antisense oligomer comprises a phosphorothioate linkage or a phosphorodiamidate linkage.

[0011] In some cases, the antisense oligomer comprises a phosphorodiamidate morpholino, a locked nucleic acid, a peptide nucleic acid, a 2′-O-methyl moiety, a 2′-Fluoro moiety, a 2′-O-methoxyethyl moiety, or a 2′-NMA moiety.

[0012] In some cases, the antisense oligomer comprises at least one modified sugar moiety.

[0013] In some cases, the antisense oligomer comprises at least one, two, three, four, five, or six modified nucleosides at a 5′ end of the antisense oligomer.

[0014] In some cases, the antisense oligomer comprises one, two, three, four, five, or six modified nucleosides at a 5′ end of the antisense oligomer.

[0015] In some cases, the antisense oligomer comprises one, two, three, four, five, or six 2′-O-methoxyethyl modified nucleosides at a 5′ end of the antisense oligomer.

[0016] In some cases, the antisense oligomer comprises at least one, two, three, four, five, or six modified nucleosides at a 3′ end of the antisense oligomer.

[0017] In some cases, the antisense oligomer comprises one, two, three, four, five, or six modified nucleosides at a 3′ end of the antisense oligomer.

[0018] In some cases, the antisense oligomer comprises one, two, three, four, five, or six 2′-O-methoxyethyl modified nucleosides at a 3′ end of the antisense oligomer.

[0019] In some cases, the antisense oligomer comprises three, four, five, or six 2′-O-methoxyethyl modified nucleosides at a 5′ end of the antisense oligomer; three, four, five, or six 2′-O-methoxyethyl modified nucleosides at a 3′ end of the antisense oligomer; and a phosphorothioate linkage between any two neighboring nucleosides of the antisense oligomer.

[0020] In some cases, the antisense oligomer comprises: a 5′ region consisting of three, four, five, or six linked nucleosides; a central region consisting of eight, nine, ten, eleven, or twelve linked nucleosides; and a 3′ region consisting of three, four, five, or six linked nucleosides; wherein each of the three, four, five, or six linked nucleosides in the 5′ region and each of three, four, five, or six linked nucleosides in the 3′ region comprise a modified sugar moiety, and wherein each of the eight, nine, ten, eleven, or twelve linked nucleosides in the central region is a deoxyribonucleoside.

[0021] In some cases, the antisense oligomer consists of from 8 to 50 nucleobases, 8 to 40 nucleobases, 8 to 35 nucleobases, 8 to 30 nucleobases, 8 to 25 nucleobases, 8 to 20 nucleobases, 8 to 15 nucleobases, 10 to 50 nucleobases, 10 to 40 nucleobases, 10 to 35 nucleobases, 10 to 30 nucleobases, 10 to 25 nucleobases, 10 to 20 nucleobases, 10 to 15 nucleobases, 12 to 50 nucleobases, 12 to 40 nucleobases, 12 to 35 nucleobases, 12 to 30 nucleobases, 12 to 25 nucleobases, 12 to 20 nucleobases, 12 to 15 nucleobases, 15 to 50 nucleobases, 15 to 40 nucleobases, 15 to 35 nucleobases, 15 to 30 nucleobases, 15 to 25 nucleobases, 15 to 20 nucleobases, 15 to 19 nucleobases, 15 to 18 nucleobases, 15 to 16 nucleobases, 16 to 20 nucleobases, 16 to 19 nucleobases, 16 to 18 nucleobases, 17 to 20 nucleobases, 17 to 19 nucleobases, or 18 to 20 nucleobases.

[0022] In some cases, the antisense oligomer is a modified oligonucleotide comprising the sequence set forth in any one of SEQ ID NO: 154-189 or 192-247.

[0023] In some cases, the vector comprises a viral vector encoding the agent.

[0024] In some cases, the viral vector comprises an adenoviral vector, adeno-associated viral (AAV) vector, lentiviral vector, Herpes Simplex Virus (HSV) viral vector, or retroviral vector.

[0025] In some cases, the antisense oligomer comprises a sequence with at least 80% identity to the sequence set forth in any one of SEQ ID NO: 1-92.

[0026] In some cases, the antisense oligomer comprises a sequence with at least 90% identity to the sequence set forth in any one of SEQ ID NO: 1-92.

[0027] In some cases, the antisense oligomer comprises a sequence with 100% identity to the sequence set forth in any one of SEQ ID NO: 1-92.

[0028] In some cases, the antisense oligomer consists of a sequence with at least 80% identity to the sequence set forth in any one of SEQ ID NO: 1-92.

[0029] In some cases, the antisense oligomer consists of a sequence with at least 90% identity to the sequence set forth in any one of SEQ ID NO: 1-92.

[0030] In some cases, the antisense oligomer consists of a sequence with 100% identity to the sequence set forth in any one of SEQ ID NO: 1-92.

[0031] In some cases, the method reduces a level of processed mRNA encoding the UBE3A protein in the mammalian cell.

[0032] In some cases, the level of the processed mRNA encoding the UBE3A protein in the mammalian cell contacted with the agent or the vector is decreased by about 10% to about 99%, about 10% to about 95%, about 10% to about 90%, about 10% to about 80%, about 10% to about 70%, about 10% to about 60%, about 10% to about 50%, about 10% to about 40%, about 10% to about 30%, about 10% to about 20%, about 20% to about 90%, about 20% to about 80%, about 20% to about 70%, about 20% to about 60%, about 20% to about 50%, about 20% to about 40%, about 20% to about 30%, about 30% to about 80%, about 30% to about 70%, about 30% to about 60%, about 30% to about 50%, about 40% to about 70%, about 40% to about 60%, about 40% to about 50%, about 50% to about 99%, about 50% to about 95%, about 50% to about 90%, about 50% to about 80%, about 50% to about 70%, about 50% to about 60%, about 60% to about 99%, about 60% to about 95%, about 60% to about 90%, about 60% to about 80%, about 60% to about 70%, about 70% to about 99%, about 70% to about 95%, about 70% to about 90%, about 70% to about 80%, about 80% to about 99%, about 80% to about 95%, about 80% to about 90%, about 90% to about 99%, about 90% to about 95%, or about 95% to about 99%, as compared to an otherwise same cell not contacted with the agent or the vector.

[0033] In some cases, the level of the processed mRNA encoding the UBE3A protein in the mammalian cell contacted with the agent or the vector is decreased by at least about 10%, at least about 15%, at least about 20%, at least about 25%, at least about 30%, at least about 35%, at least about 40%, at least about 45%, at least about 50%, at least about 55%, at least about 60%, at least about 65%, at least about 70%, at least about 75%, at least about 80%, at least about 85%, at least about 90%, at least about 95%, or at least about 99%, as compared to an otherwise same mammalian cell not contacted with the agent or the vector.

[0034] In some cases, the method reduces a level of the UBE3A protein in the mammalian cell.

[0035] In some cases, the level of the UBE3A protein in the mammalian cell contacted with the agent or the vector is decreased by about 10% to about 99%, about 10% to about 95%, about 10% to about 90%, about 10% to about 80%, about 10% to about 70%, about 10% to about 60%, about 10% to about 50%, about 10% to about 40%, about 10% to about 30%, about 10% to about 20%, about 20% to about 90%, about 20% to about 80%, about 20% to about 70%, about 20% to about 60%, about 20% to about 50%, about 20% to about 40%, about 20% to about 30%, about 30% to about 80%, about 30% to about 70%, about 30% to about 60%, about 30% to about 50%, about 40% to about 70%, about 40% to about 60%, about 40% to about 50%, about 50% to about 99%, about 50% to about 95%, about 50% to about 90%, about 50% to about 80%, about 50% to about 70%, about 50% to about 60%, about 60% to about 99%, about 60% to about 95%, about 60% to about 90%, about 60% to about 80%, about 60% to about 70%, about 70% to about 99%, about 70% to about 95%, about 70% to about 90%, about 70% to about 80%, about 80% to about 99%, about 80% to about 95%, about 80% to about 90%, about 90% to about 99%, about 90% to about 95%, or about 95% to about 99%, as compared to an otherwise same cell not contacted with the agent or the vector.

[0036] In some cases, the level of the UBE3A protein in the mammalian cell contacted with the agent or the vector is decreased by at least about 10%, at least about 15%, at least about 20%, at least about 25%, at least about 30%, at least about 35%, at least about 40%, at least about 45%, at least about 50%, at least about 55%, at least about 60%, at least about 65%, at least about 70%, at least about 75%, at least about 80%, at least about 85%, at least about 90%, at least about 95%, or at least about 99%, as compared to an otherwise same cell not contacted with the agent or the vector.

[0037] In some cases, the method comprises contacting the agent or the vector to a population of mammalian cells.

[0038] In some cases, the agent reduces a level of the processed mRNA encoding the UBE3A protein in the population of mammalian cells by at most about 75%, at most about 70%, at most about 60%, at most about 50%, at most about 40%, at most about 30%, or at most about 20%, as compared to an otherwise same population of mammalian cells not contacted with the agent or the vector.

[0039] In some cases, the agent reduces a level of the UBE3A protein in the population of mammalian cells by at most about 75%, at most about 70%, at most about 60%, at most about 50%, at most about 40%, at most about 30%, or at most about 20%, as compared to an otherwise same population of mammalian cells not contacted with the agent or the vector.

[0040] In some cases, the mammalian cell is ex vivo.

[0041] In some cases, the mammalian cell is in vivo.

[0042] In some cases, genome of the mammalian cell has a duplication of a genomic region that encompasses the UBE3A gene encoding the UBE3A protein.

[0043] In some cases, the mammalian cell is a human cell, and wherein genome of the cell has a duplication of chromosome 15q11.2-q13.1.

[0044] In some cases, the mammalian cell is obtained from a human subject suffering from Dup15q syndrome, or a progeny of a sample cell obtained from the human subject.

[0045] Disclosed herein, in some aspects, is an antisense oligomer that comprises a sequence with at least 80% identity to the sequence set forth in any one of SEQ ID NO: 1-92.

[0046] In some cases, the antisense oligomer comprises a backbone modification, a modified sugar moiety or a combination thereof.

[0047] In some cases, the antisense oligomer comprises a phosphorothioate linkage or a phosphorodiamidate linkage.

[0048] In some cases, the antisense oligomer comprises a phosphorodiamidate morpholino, a locked nucleic acid, a peptide nucleic acid, a 2′-O-methyl moiety, a 2′-Fluoro moiety, a 2′-O-methoxyethyl moiety, or a 2′-NMA moiety.

[0049] In some cases, the antisense oligomer comprises at least one modified sugar moiety.

[0050] In some cases, the antisense oligomer comprises at least one, two, three, four, five, or six modified nucleosides at a 5′ end of the antisense oligomer.

[0051] In some cases, the antisense oligomer comprises one, two, three, four, five, or six modified nucleosides at a 5′ end of the antisense oligomer.

[0052] In some cases, the antisense oligomer comprises one, two, three, four, five, or six 2′-O-methoxyethyl modified nucleosides at a 5′ end of the antisense oligomer.

[0053] In some cases, the antisense oligomer comprises at least one, two, three, four, five, or six modified nucleosides at a 3′ end of the antisense oligomer.

[0054] In some cases, the antisense oligomer comprises one, two, three, four, five, or six modified nucleosides at a 3′ end of the antisense oligomer.

[0055] In some cases, the antisense oligomer comprises one, two, three, four, five, or six 2′-O-methoxyethyl modified nucleosides at a 3′ end of the antisense oligomer.

[0056] In some cases, the antisense oligomer comprises three, four, five, or six 2′-O-methoxyethyl modified nucleosides at a 5′ end of the antisense oligomer; three, four, five, or six 2′-O-methoxyethyl modified nucleosides at a 3′ end of the antisense oligomer; and a phosphorothioate linkage between any two neighboring nucleosides of the antisense oligomer.

[0057] In some cases, the antisense oligomer comprises: a 5′ region consisting of three, four, five, or six linked nucleosides; a central region consisting of eight, nine, ten, eleven, or twelve linked nucleosides; and a 3′ region consisting of three, four, five, or six linked nucleosides; wherein each of the three, four, five, or six linked nucleosides in the 5′ region and each of three, four, five, or six linked nucleosides in the 3′ region comprise a modified sugar moiety, and wherein each of the eight, nine, ten, eleven, or twelve linked nucleosides in the central region is a deoxyribonucleoside.

[0058] In some cases, the antisense oligomer consists of from 8 to 50 nucleobases, 8 to 40 nucleobases, 8 to 35 nucleobases, 8 to 30 nucleobases, 8 to 25 nucleobases, 8 to 20 nucleobases, 8 to 15 nucleobases, 10 to 50 nucleobases, 10 to 40 nucleobases, 10 to 35 nucleobases, 10 to 30 nucleobases, 10 to 25 nucleobases, 10 to 20 nucleobases, 10 to 15 nucleobases, 12 to 50 nucleobases, 12 to 40 nucleobases, 12 to 35 nucleobases, 12 to 30 nucleobases, 12 to 25 nucleobases, 12 to 20 nucleobases, 12 to 15 nucleobases, 15 to 50 nucleobases, 15 to 40 nucleobases, 15 to 35 nucleobases, 15 to 30 nucleobases, 15 to 25 nucleobases, 15 to 20 nucleobases, 15 to 19 nucleobases, 15 to 18 nucleobases, 15 to 16 nucleobases, 16 to 20 nucleobases, 16 to 19 nucleobases, 16 to 18 nucleobases, 17 to 20 nucleobases, 17 to 19 nucleobases, or 18 to 20 nucleobases.

[0059] In some cases, the antisense oligomer comprises a sequence with at least 80% identity to the sequence set forth in any one of SEQ ID NO: 1-92.

[0060] In some cases, the antisense oligomer comprises a sequence with at least 90% identity to the sequence set forth in any one of SEQ ID NO: 1-92.

[0061] In some cases, the antisense oligomer comprises a sequence with 100% identity to the sequence set forth in any one of SEQ ID NO: 1-92.

[0062] In some cases, the antisense oligomer consists of a sequence with at least 80% identity to the sequence set forth in any one of SEQ ID NO: 1-92.

[0063] In some cases, the antisense oligomer consists of a sequence with at least 90% identity to the sequence set forth in any one of SEQ ID NO: 1-92.

[0064] In some cases, the antisense oligomer consists of a sequence with 100% identity to the sequence set forth in any one of SEQ ID NO: 1-92.

[0065] In some cases, the antisense oligomer is a modified oligonucleotide comprising the sequence set forth in any one of SEQ ID NO: 154-189 or 192-247.

[0066] In some cases, the antisense oligomer is a modified oligonucleotide consisting of the sequence set forth in any one of SEQ ID NO: 154-189 or 192-247.

[0067] In some cases, the antisense oligomer is configured to reduce a level of a processed mRNA transcript encoding a UBE3A protein in a population of mammalian cells upon contact with the population.

[0068] In some cases, the antisense oligomer is configured to reduce the level of the processed mRNA encoding the UBE3A protein in the population by about 10% to about 99%, about 10% to about 95%, about 10% to about 90%, about 10% to about 80%, about 10% to about 70%, about 10% to about 60%, about 10% to about 50%, about 10% to about 40%, about 10% to about 30%, about 10% to about 20%, about 20% to about 90%, about 20% to about 80%, about 20% to about 70%, about 20% to about 60%, about 20% to about 50%, about 20% to about 40%, about 20% to about 30%, about 30% to about 80%, about 30% to about 70%, about 30% to about 60%, about 30% to about 50%, about 40% to about 70%, about 40% to about 60%, about 40% to about 50%, about 50% to about 99%, about 50% to about 95%, about 50% to about 90%, about 50% to about 80%, about 50% to about 70%, about 50% to about 60%, about 60% to about 99%, about 60% to about 95%, about 60% to about 90%, about 60% to about 80%, about 60% to about 70%, about 70% to about 99%, about 70% to about 95%, about 70% to about 90%, about 70% to about 80%, about 80% to about 99%, about 80% to about 95%, about 80% to about 90%, about 90% to about 99%, about 90% to about 95%, or about 95% to about 99%, as compared to an otherwise same population of mammalian cells not contacted with the antisense oligomer.

[0069] In some cases, the antisense oligomer is configured to reduce the level of the processed mRNA encoding the UBE3A protein in the population by at least about 10%, at least about 15%, at least about 20%, at least about 25%, at least about 30%, at least about 35%, at least about 40%, at least about 45%, at least about 50%, at least about 55%, at least about 60%, at least about 65%, at least about 70%, at least about 75%, at least about 80%, at least about 85%, at least about 90%, at least about 95%, or at least about 99%, as compared to an otherwise same cell not contacted with the antisense oligomer.

[0070] In some cases, the antisense oligomer is configured to reduce the level of the processed mRNA encoding the UBE3A protein in the population by at most about 75%, at most about 70%, at most about 60%, at most about 50%, at most about 40%, at most about 30%, or at most about 20%, as compared to an otherwise same population of mammalian cells not contacted with the antisense oligomer.

[0071] In some cases, the antisense oligomer is configured to reduce a level of the UBE3A protein in the population of mammalian cells.

[0072] In some cases, the antisense oligomer is configured to reduce the level of the UBE3A protein in the population by about 10% to about 99%, about 10% to about 95%, about 10% to about 90%, about 10% to about 80%, about 10% to about 70%, about 10% to about 60%, about 10% to about 50%, about 10% to about 40%, about 10% to about 30%, about 10% to about 20%, about 20% to about 90%, about 20% to about 80%, about 20% to about 70%, about 20% to about 60%, about 20% to about 50%, about 20% to about 40%, about 20% to about 30%, about 30% to about 80%, about 30% to about 70%, about 30% to about 60%, about 30% to about 50%, about 40% to about 70%, about 40% to about 60%, about 40% to about 50%, about 50% to about 99%, about 50% to about 95%, about 50% to about 90%, about 50% to about 80%, about 50% to about 70%, about 50% to about 60%, about 60% to about 99%, about 60% to about 95%, about 60% to about 90%, about 60% to about 80%, about 60% to about 70%, about 70% to about 99%, about 70% to about 95%, about 70% to about 90%, about 70% to about 80%, about 80% to about 99%, about 80% to about 95%, about 80% to about 90%, about 90% to about 99%, about 90% to about 95%, or about 95% to about 99%, as compared to an otherwise same population of mammalian cells not contacted with the antisense oligomer.

[0073] In some cases, the antisense oligomer is configured to reduce the level of the UBE3A protein in the population by at least about 10%, at least about 15%, at least about 20%, at least about 25%, at least about 30%, at least about 35%, at least about 40%, at least about 45%, at least about 50%, at least about 55%, at least about 60%, at least about 65%, at least about 70%, at least about 75%, at least about 80%, at least about 85%, at least about 90%, at least about 95%, or at least about 99%, as compared to an otherwise same population of mammalian cells not contacted with the antisense oligomer.

[0074] In some cases, the antisense oligomer is configured to reduce the level of the UBE3A protein in the population by at most about 75%, at most about 70%, at most about 60%, at most about 50%, at most about 40%, at most about 30%, or at most about 20%, as compared to an otherwise same population of mammalian cells not contacted with the antisense oligomer.

[0075] In some cases, the mammalian cell is ex vivo.

[0076] In some cases, the mammalian cell is in vivo.

[0077] In some cases, genome of the mammalian cell has a duplication of a genomic region that encompasses the UBE3A gene encoding the UBE3A protein.

[0078] In some cases, the mammalian cell is a human cell.

[0079] In some cases, genome of the mammalian cell has a duplication of chromosome 15q11.2-q13.1.

[0080] In some cases, the mammalian cell is obtained from a human subject suffering from Dupl5q syndrome, or a progeny of a sample cell obtained from the human subject.

[0081] Disclosed herein, in some aspects, is a pharmaceutical composition, comprising: (a) a pharmaceutically acceptable excipient or carrier; and (b) the antisense oligomer disclosed herein.

[0082] Disclosed herein, in some aspects, is a pharmaceutical composition, comprising: (a) a pharmaceutically acceptable excipient or carrier; and (b) an agent or a vector encoding the agent, wherein the agent is configured to reduce a level of a processed mRNA transcript encoding a UBE3A protein in a mammalian cell upon contact with the mammalian cell.

[0083] In some cases, the agent comprises a polynucleotide sequence that is at least 80% complementary to at least 8 contiguous nucleic acids of the sequence set forth in any one of SEQ ID NO: 93-120.

[0084] In some cases, the agent comprises a polynucleotide sequence that is at least 80% complementary to at least 8 contiguous nucleic acids of each mRNA transcript listed in Table 2.

[0085] In some cases, the agent comprises an antisense oligomer.

[0086] In some cases, the antisense oligomer has at least 80% identity to the sequence set forth in any one of SEQ ID NO: 1-92.

[0087] In some cases, the pharmaceutical composition comprises the vector, and wherein the vector comprises a viral vector encoding the agent.

[0088] In some cases, the viral vector comprises an adenoviral vector, adeno-associated viral (AAV) vector, lentiviral vector, Herpes Simplex Virus (HSV) viral vector, or retroviral vector.

[0089] In some cases, the antisense oligomer comprises a sequence with at least 80% identity to the sequence set forth in any one of SEQ ID NO: 1-92.

[0090] In some cases, the antisense oligomer comprises a sequence with at least 90% identity to the sequence set forth in any one of SEQ ID NO: 1-92.

[0091] In some cases, the antisense oligomer comprises a sequence with 100% identity to the sequence set forth in any one of SEQ ID NO: 1-92.

[0092] In some cases, the antisense oligomer consists of a sequence with at least 80% identity to the sequence set forth in any one of SEQ ID NO: 1-92.

[0093] In some cases, the antisense oligomer consists of a sequence with at least 90% identity to the sequence set forth in any one of SEQ ID NO: 1-92.

[0094] In some cases, the antisense oligomer consists of a sequence with 100% identity to the sequence set forth in any one of SEQ ID NO: 1-92.

[0095] In some cases, the antisense oligomer is a modified oligonucleotide comprising the sequence set forth in any one of SEQ ID NO: 154-189 or 192-247.

[0096] In some cases, the antisense oligomer is a modified oligonucleotide consisting of the sequence set forth in any one of SEQ ID NO: 154-189 or 192-247.

[0097] In some cases, the agent is configured to reduce the level of the processed mRNA encoding the UBE3A protein in the population of the mammalian cells upon contact with the population.

[0098] In some cases, the antisense oligomer is configured to reduce the level of the processed mRNA encoding the UBE3A protein in the population by about 10% to about 99%, about 10% to about 95%, about 10% to about 90%, about 10% to about 80%, about 10% to about 70%, about 10% to about 60%, about 10% to about 50%, about 10% to about 40%, about 10% to about 30%, about 10% to about 20%, about 20% to about 90%, about 20% to about 80%, about 20% to about 70%, about 20% to about 60%, about 20% to about 50%, about 20% to about 40%, about 20% to about 30%, about 30% to about 80%, about 30% to about 70%, about 30% to about 60%, about 30% to about 50%, about 40% to about 70%, about 40% to about 60%, about 40% to about 50%, about 50% to about 99%, about 50% to about 95%, about 50% to about 90%, about 50% to about 80%, about 50% to about 70%, about 50% to about 60%, about 60% to about 99%, about 60% to about 95%, about 60% to about 90%, about 60% to about 80%, about 60% to about 70%, about 70% to about 99%, about 70% to about 95%, about 70% to about 90%, about 70% to about 80%, about 80% to about 99%, about 80% to about 95%, about 80% to about 90%, about 90% to about 99%, about 90% to about 95%, or about 95% to about 99%, as compared to an otherwise same population of mammalian cells not contacted with the agent or the vector.

[0099] In some cases, the agent is configured to reduce the level of the processed mRNA encoding the UBE3A protein in the population by at least about 10%, at least about 15%, at least about 20%, at least about 25%, at least about 30%, at least about 35%, at least about 40%, at least about 45%, at least about 50%, at least about 55%, at least about 60%, at least about 65%, at least about 70%, at least about 75%, at least about 80%, at least about 85%, at least about 90%, at least about 95%, or at least about 99%, as compared to an otherwise same population of mammalian cells not contacted with the agent or the vector.

[0100] In some cases, the agent is configured to reduce the level of the processed mRNA encoding the UBE3A protein in the population by at most about 75%, at most about 70%, at most about 60%, at most about 50%, at most about 40%, at most about 30%, or at most about 20%, as compared to an otherwise same population of mammalian cells not contacted with the antisense oligomer.

[0101] In some cases, the agent is configured to reduce a level of the UBE3A protein in the population.

[0102] In some cases, the agent is configured to reduce the level of the UBE3A protein in the population by about 10% to about 99%, about 10% to about 95%, about 10% to about 90%, about 10% to about 80%, about 10% to about 70%, about 10% to about 60%, about 10% to about 50%, about 10% to about 40%, about 10% to about 30%, about 10% to about 20%, about 20% to about 90%, about 20% to about 80%, about 20% to about 70%, about 20% to about 60%, about 20% to about 50%, about 20% to about 40%, about 20% to about 30%, about 30% to about 80%, about 30% to about 70%, about 30% to about 60%, about 30% to about 50%, about 40% to about 70%, about 40% to about 60%, about 40% to about 50%, about 50% to about 99%, about 50% to about 95%, about 50% to about 90%, about 50% to about 80%, about 50% to about 70%, about 50% to about 60%, about 60% to about 99%, about 60% to about 95%, about 60% to about 90%, about 60% to about 80%, about 60% to about 70%, about 70% to about 99%, about 70% to about 95%, about 70% to about 90%, about 70% to about 80%, about 80% to about 99%, about 80% to about 95%, about 80% to about 90%, about 90% to about 99%, about 90% to about 95%, or about 95% to about 99%, as compared to an otherwise same population of mammalian cells not contacted with the agent or the vector.

[0103] In some cases, the agent is configured to reduce the level of the UBE3A protein in the population by at least about 10%, at least about 15%, at least about 20%, at least about 25%, at least about 30%, at least about 35%, at least about 40%, at least about 45%, at least about 50%, at least about 55%, at least about 60%, at least about 65%, at least about 70%, at least about 75%, at least about 80%, at least about 85%, at least about 90%, at least about 95%, or at least about 99%, as compared to an otherwise same population of mammalian cells not contacted with the agent or the vector.

[0104] In some cases, the agent is configured to reduce the level of the UBE3A protein in the population by at most about 75%, at most about 70%, at most about 60%, at most about 50%, at most about 40%, at most about 30%, or at most about 20%, as compared to an otherwise same population of mammalian cells not contacted with the antisense oligomer.

[0105] In some cases, the mammalian cell is ex vivo. In some cases, the mammalian cell is in vivo. In some cases, genome of the mammalian cell has a duplication of a genomic region that encompasses the UBE3A gene encoding the UBE3A protein.

[0106] In some cases, the mammalian cell is a human cell. In some cases, genome of the mammalian cell has a duplication of chromosome 15q11.2-q13.1.

[0107] In some cases, the mammalian cell is obtained from a human subject suffering from Dupl5q syndrome, or a progeny of a sample cell obtained from the human subject.

[0108] In some cases, the pharmaceutical composition is formulated for intracerebroventricular injection, intraperitoneal injection, intramuscular injection, intrathecal injection, intra cisterna magna injection, subcutaneous injection, oral administration, synovial injection, intravitreal administration, subretinal injection, topical application, implantation, or intravenous injection.

[0109] In some cases, the pharmaceutical composition is formulated for intrathecal injection.

[0110] In some cases, the pharmaceutically acceptable excipient or carrier comprises artificial cerebrospinal fluid.

[0111] In some cases, the pharmaceutical composition further comprises a second therapeutic agent.

[0112] In some cases, the second therapeutic agent comprises a small molecule, an antisense oligomer, or a gene editing molecule.

[0113] Disclosed herein, in some aspects, is a method of treating or reducing the likelihood of developing a disease or condition in a subject in need thereof by reducing expression of a UBE3A protein in cells of the subject, comprising contacting to the cells of the subject the pharmaceutical composition disclosed herein.

[0114] In some cases, the disease or condition is associated with overexpression or gain-of-function mutation in a UBE3A gene encoding the UBE3A protein.

[0115] In some cases, genomes of the cells of the subject have at least one excessive copy of a UBE3A gene encoding the UBE3A protein.

[0116] In some cases, genomes of the cells of the subject have a duplication of a genomic region encompassing a UBE3A gene encoding the UBE3A protein.

[0117] In some cases, genomes of the cells of the subject have a duplication of chromosome 15q11.2-q13.1.

[0118] In some cases, the disease or condition comprises Dup15q syndrome, autism spectrum disorder, epilepsy, or intellectual disability.

[0119] In some cases, the subject is a human. In some cases, the subject is a fetus, an embryo, or a child. In some cases, the cells are ex vivo.

[0120] In some cases, the method comprises administering the pharmaceutical composition to the subject by intracerebroventricular injection, intraperitoneal injection, intramuscular injection, intrathecal injection, intra cisterna magna injection, subcutaneous injection, oral administration, synovial injection, intravitreal administration, subretinal injection, topical application, implantation, or intravenous injection.

[0121] In some cases, the method comprises administering the pharmaceutical composition to the subject by intrathecal injection.

[0122] In some cases, the method treats the disease or condition.

### INCORPORATION BY REFERENCE

[0123] All publications, patents, and patent applications mentioned in this specification are herein incorporated by reference to the same extent as if each individual publication, patent, or patent application was specifically and individually indicated to be incorporated by reference.

### BRIEF DESCRIPTION OF THE DRAWINGS

[0124] The novel features of the disclosure are set forth with particularity in the appended claims. A better understanding of the features and advantages of the present disclosure will be obtained by reference to the following detailed description that sets forth illustrative embodiments, in which the principles of the disclosure are utilized, and the accompanying drawings of which:

[0125] FIGS. 1A-ID show concentration response curves (CRCs) for each of 22 exemplary ASOs according to some embodiments of the present disclosure, as measured by percentage knockdown of human UBE3A gene in the cells treated with respective ASOs.

[0126] FIGS. 2A-2B are histograms illustrating the effect of various controls on UBE3A mRNA knockdown.

[0127] FIGS. 3A-3B are histograms showing the effect of exemplary ASOs at two different concentrations (6.3 μM and 20 μM, respectively) on the knockdown of UBE3A mRNA level on treatment Day 7, treatment Day 10, and treatment Day 14.

[0128] FIGS. 3C-3D are histograms illustrating the effect of test ASOs at two different concentrations (6.3 μM and 20 μM, respectively) on the reduction of UBE3A protein expression on treatment Day 7, treatment Day 10, and treatment Day 14.

[0129] FIGS. 4A-4D are histograms illustrating the fold changes in mRNA and protein expression in F-Dup and Corrected neuron cells. FIG. 4A illustrates the relative UBE3A mRNA expression on differentiation day 11 of F-Dup and Corrected neuronal cells (normalized to Corrected neuronal cells). FIG. 4B illustrates the relative UBE3A protein expression on differentiation Day 11 of F-Dup and Corrected neuronal cells (normalized to Corrected neuronal cells). FIG. 4C illustrates the relative UBE3A mRNA expression on differentiation day 22 of the F-Dup and Corrected neuronal cells (normalized to Corrected neuronal cells). FIG. 4D illustrates the relative UBE3A protein expression on differentiation day 22 of F-Dup and Corrected neuronal cells (normalized to Corrected neuronal cells).

[0130] FIGS. 5A-5B illustrate the UBE3A protein expression levels on ASO treatment days 7 and 10 at 6.3 μM (FIG. 5A) and 20 μM (FIG. 5B) of the exemplary ASOs on F-Dup neurons on treatment Day 7, treatment Day 10, and treatment Day 14.

[0131] FIG. 6 is a graphical representation of the timeline for time neuronal cells spent in culture, duration of ASO treatment, and duration of wash-out culture media.

### DETAILED DESCRIPTION

[0132] The section headings used herein are for organizational purposes only and are not to be construed as limiting the subject matter described.

### Certain Terminology

[0133] Unless specific definitions are provided, the nomenclature utilized in connection with, and the procedures and techniques of, analytical chemistry, synthetic organic chemistry, and medicinal and pharmaceutical chemistry described herein are those well-known and commonly used in the art. Standard techniques may be used for chemical synthesis, and chemical analysis.

[0134] Unless otherwise indicated, the following terms have the following meanings.

[0135] “Administering” can mean providing a pharmaceutical agent to an animal, and includes, but is not limited to administering by a medical professional and self-administering. “Amelioration” refers to a lessening, slowing, stopping, or reversing of at least one indicator of the severity of a syndrome or condition. The severity of indicators may be determined by subjective or objective measures, which are known to those skilled in the art.

[0136] “Animal” can refer to a human or non-human animal, including, but not limited to, mice, rats, rabbits, dogs, cats, pigs, and non-human primates, including, but not limited to, monkeys and chimpanzees.

[0137] “Antisense oligomer” can mean an oligomeric compound that is capable of undergoing hybridization to a target nucleic acid through hydrogen bonding. Examples of antisense oligomers include single-stranded and double-stranded compounds, such as, antisense oligonucleotides, siRNAs, shRNAs, and ssRNAs.

[0138] “Antisense inhibition” or “inhibition” can mean reduction of target nucleic acid levels in the presence of an antisense oligomer complementary to a target nucleic acid compared to target nucleic acid levels or in the absence of the antisense oligomer.

[0139] “Antisense mechanisms” can refer to all those mechanisms involving hybridization of a compound with a target nucleic acid, wherein the outcome or effect of the hybridization is either target degradation or target occupancy with concomitant stalling of the cellular machinery involving, for example, transcription or splicing. An antisense oligomer provided herein can be “antisense” to a target nucleic acid, meaning that the antisense oligomer is capable of undergoing hybridization to a target nucleic acid through hydrogen bonding.

[0140] “Antisense oligonucleotide” can mean a single-stranded oligonucleotide having a nucleobase sequence that permits hybridization to a corresponding segment of a target nucleic acid.

[0141] “Base complementarity” can refer to the capacity for the precise base pairing of nucleobases of an antisense oligonucleotide with corresponding nucleobases in a target nucleic acid (i.e., hybridization), and is mediated by Watson-Crick, Hoogsteen or reversed Hoogsteen hydrogen binding between corresponding nucleobases.

[0142] “Bicyclic sugar” can mean a furanose ring modified by the bridging of two atoms. A bicyclic sugar is a modified sugar.

[0143] “Bicyclic nucleoside” (also “BNA”) can mean a nucleoside having a sugar moiety comprising a bridge connecting two carbon atoms of the sugar ring, thereby forming a bicyclic ring system. In certain embodiments, the bridge connects the 4′-carbon and the 2′-carbon of the sugar ring.

[0144] “Cap structure” or “terminal cap moiety” can mean chemical modifications, which have been incorporated at either terminus of an antisense oligomer. “cEt” or “constrained ethyl” can mean a bicyclic nucleoside having a sugar moiety comprising a bridge connecting the 4′-carbon and the 2′-carbon, wherein the bridge has the formula: 4′-CH(CH₃)—O-2′

[0145] “Constrained ethyl nucleoside” (also cEt nucleoside) can mean a nucleoside comprising a bicyclic sugar moiety comprising a 4′-CH(CH₃)—O-2′ bridge.

[0146] “Chimeric antisense oligomer” can mean an antisense oligomer that has at least two chemically distinct regions, each position having a plurality of subunits.

[0147] “Complementarity” can mean the capacity for pairing between nucleobases of a first nucleic acid and a second nucleic acid.

[0148] “Contiguous nucleobases” can mean nucleobases immediately adjacent to each other.

[0149] “Diluent” can mean an ingredient in a composition that lacks pharmacological activity, but is pharmaceutically necessary or desirable. For example, in drugs that are injected, the diluent may be a liquid, e.g., saline solution.

[0150] “Effective amount” in the context of modulating an activity or of treating or preventing a condition can mean the administration of that amount of pharmaceutical agent to an individual in need of such modulation, treatment, or prophylaxis, either in a single dose or as part of a series, that is effective for modulation of that effect, or for treatment or prophylaxis or improvement of that condition. The effective amount may vary among individuals depending on the health and physical condition of the individual to be treated, the taxonomic group of the individuals to be treated, the formulation of the composition, assessment of the individual's medical condition, and other relevant factors.

[0151] “Efficacy” or “potency,” which are used herein interchangeably, can mean the ability to produce a desired effect.

[0152] “Expression” can include all the processes by which a gene's coded information is converted into structures present and operating in a cell. Such structures include, but are not limited to the products of transcription and translation.

[0153] “Gapmer” can mean a chimeric antisense oligomer in which an internal region having a plurality of nucleosides that support RNase H cleavage is positioned between external regions having one or more nucleosides, wherein the nucleosides comprising the internal region are chemically distinct from the nucleoside or nucleosides comprising the external regions. The internal region can be referred to as a “gap” and the external regions can be referred to as the “wings.”

[0154] “Hybridization” can mean the annealing of complementary nucleic acid molecules. In certain embodiments, complementary nucleic acid molecules include, but are not limited to, an antisense oligomer and a target nucleic acid. In certain embodiments, complementary nucleic acid molecules include, but are not limited to, an antisense oligonucleotide and a nucleic acid target.

[0155] “Individual” can mean a human or non-human animal selected for treatment or therapy.

[0156] “Inhibiting UBE3A” or “inhibiting UBE3A” can mean reducing the level or expression of a UBE3A mRNA and/or UBE3A protein. In certain embodiments, UBE3A mRNA and/or UBE3A protein levels are inhibited in the presence of an antisense oligomer targeting UBE3A, including an antisense oligonucleotide targeting UBE3A, as compared to expression of UBE3A mRNA and/or UBE3A protein levels in the absence of a UBE3A antisense oligomer, such as an antisense oligonucleotide.

[0157] “Inhibiting the expression or activity” can refer to a reduction or blockade of the expression or activity and does not necessarily indicate a total elimination of expression or activity.

[0158] “Internucleoside linkage” can refer to the chemical bond between nucleosides.

[0159] “Intra-cisterna magna” or “ICM” injection or delivery can refer to injection of an agent or pharmaceutical composition provided herein in the cerebrospinal fluid (CSF)-filled subarachnoid space between the cerebellum and the dorsal side of the medulla oblongata.

[0160] “Linked nucleosides” can refer to adjacent nucleosides linked together by an internucleoside linkage.

[0161] “UBE3A antisense oligomer” can mean an antisense oligomer targeting UBE3A mRNA.

[0162] “Mismatch” or “non-complementary nucleobase” can refer to the case when a nucleobase of a first nucleic acid is not capable of pairing with the corresponding nucleobase of a second or target nucleic acid.

[0163] “Modified internucleoside linkage” can refer to a substitution or any change from a naturally occurring internucleoside bond (i.e., a phosphodiester internucleoside bond).

[0164] “Modified nucleobase” can refer to any nucleobase other than adenine, cytosine, guanine, thymidine, or uracil. An “unmodified nucleobase” means the purine bases adenine (A) and guanine (G), and the pyrimidine bases thymine (T), cytosine (C), and uracil (U).

[0165] “Modified nucleoside” can refer to a nucleoside having, independently, a modified sugar moiety and/or modified nucleobase.

[0166] “Modified nucleotide” can refer to a nucleotide having, independently, a modified sugar moiety, modified intemucleoside linkage, and/or modified nucleobase.

[0167] “Modified antisense oligonucleotide” can refer to an oligonucleotide comprising at least one modified internucleoside linkage, modified sugar, and/or modified nucleobase.

[0168] “Modified sugar” can refer to substitution and/or any change from a natural sugar moiety.

[0169] “Monomer” can refer to a single unit of an oligomer. Monomers include, but are not limited to, nucleosides and nucleotides, whether naturally occurring or modified. “Motif means the pattern of unmodified and modified nucleosides in an antisense oligomer.

[0170] “Natural sugar moiety” can refer to a sugar moiety found in DNA (2′-H) or RNA (2′-OH).

[0171] “Naturally occurring internucleoside linkage” can refer to a 3′ to 5′ phosphodiester linkage.

[0172] “Non-complementary nucleobase” can refer to a pair of nucleobases that do not form hydrogen bonds with one another or otherwise support hybridization.

[0173] “Nucleic acid” can refer to molecules composed of monomeric nucleotides. A nucleic acid includes, but is not limited to, ribonucleic acids (RNA), deoxyribonucleic acids (DNA), single-stranded nucleic acids, double-stranded nucleic acids, small interfering ribonucleic acids (siRNA), and microRNAs (miRNA).

[0174] “Nucleobase” can mean a heterocyclic moiety capable of pairing with a base of another nucleic acid. “Nucleobase complementarity” can refer to a nucleobase that is capable of base pairing with another nucleobase. For example, in DNA, adenine (A) is complementary to thymine (T). For example, in RNA, adenine (A) is complementary to uracil (U). In certain embodiments, complementary nucleobase refers to a nucleobase of an antisense oligomer that is capable of base pairing with a nucleobase of its target nucleic acid. For example, if a nucleobase at a certain position of an antisense oligomer is capable of hydrogen bonding with a nucleobase at a certain position of a target nucleic acid, then the position of hydrogen bonding between the oligonucleotide and the target nucleic acid is considered to be complementary at that nucleobase pair.

[0175] “Nucleobase sequence” can refer to the order of contiguous nucleobases independent of any sugar, linkage, and/or nucleobase modification.

[0176] “Nucleoside” can refer to a nucleobase linked to a sugar.

[0177] “Nucleoside mimetic” can include those structures used to replace the sugar or the sugar and the base and not necessarily the linkage at one or more positions of an oligomeric compound such as, for example, nucleoside mimetics having morpholino, cyclohexenyl, cyclohexyl, tetrahydropyranyl, bicyclo, or tricyclo sugar mimetics, e.g., non-furanose sugar units. Nucleotide mimetic includes those structures used to replace the nucleoside and the linkage at one or more positions of an oligomeric compound such as, for example, peptide nucleic acids or morpholinos (morpholinos linked by —N(H)—C(═O)—O— or other non-phosphodiester linkage). Sugar surrogate overlaps with the slightly broader term nucleoside mimetic but is intended to indicate replacement of the sugar unit (furanose ring) only. The tetrahydropyranyl rings provided herein are illustrative of an example of a sugar surrogate wherein the furanose sugar group has been replaced with a tetrahydropyranyl ring system. “Mimetic” can refer to groups that are substituted for a sugar, a nucleobase, and/or internucleoside linkage. Generally, a mimetic can be used in place of the sugar or sugar-internucleoside linkage combination, and the nucleobase is maintained for hybridization to a selected target.

[0178] “Nucleotide” can refer to a nucleoside having a phosphate group covalently linked to the sugar portion of the nucleoside.

[0179] “Oligomeric compound” or “oligomer,” which are used herein interchangeably, can refer to a polymer of linked monomeric subunits which is capable of hybridizing to at least a region of a nucleic acid molecule.

[0180] “Oligonucleotide” can refer to a polymer of linked nucleosides each of which can be modified or unmodified, independent one from another.

[0181] “Parenteral administration” can refer to administration through injection (e.g., bolus injection) or infusion. Parenteral administration can include subcutaneous administration, intravenous administration, intramuscular administration, intraarterial administration, intraperitoneal administration, or intracranial administration, e.g., intrathecal, intracerebroventricular, or intra cisterna magna administration.

[0182] “Peptide” can refer to a molecule formed by linking at least two amino acids by amide bonds. Without limitation, as used herein, peptide refers to polypeptides and proteins.

[0183] “Pharmaceutical agent” can refer to a substance that provides a therapeutic benefit when administered to an individual. For example, in certain embodiments, an antisense oligonucleotide targeted to UBE3A is a pharmaceutical agent.

[0184] “Pharmaceutical composition” can refer to a mixture of substances suitable for administering to an individual. For example, a pharmaceutical composition can comprise an antisense oligonucleotide and a sterile aqueous solution.

[0185] “Pharmaceutically acceptable salts” can refer to physiologically and pharmaceutically acceptable salts of a pharmaceutically active ingredient (e.g., an antisense oligomer provided herein), such as salts that retain the desired biological activity of the active ingredient and do not impart undesired toxicological effects thereto.

[0186] “Phosphorothioate linkage” can mean a linkage between nucleosides where the phosphodiester bond is modified by replacing one of the non-bridging oxygen atoms with a sulfur atom. A phosphorothioate linkage is a modified intemucleoside linkage.

[0187] “Portion” can mean a defined number of contiguous (i.e., linked) nucleobases of a nucleic acid. In certain embodiments, a portion is a defined number of contiguous nucleobases of a target nucleic acid. In certain embodiments, a portion is a defined number of contiguous nucleobases of an antisense oligomer.

[0188] “Prevent” or “preventing” can mean delaying or forestalling the onset or development of a disorder or syndrome for a period of time from minutes to days, weeks to months, or indefinitely.

[0189] “Prophylactically effective amount” can mean an amount of a pharmaceutical agent that provides a prophylactic or preventative benefit to an animal.

[0190] “Ribonucleotide” can mean a nucleotide having a hydroxy at the 2′ position of the sugar portion of the nucleotide. Ribonucleotides may be modified with any of a variety of substituents.

[0191] “Segments” are defined as smaller or sub-portions of regions within a target nucleic acid.

[0192] “Targeting” or “targeted” can mean the process of design and selection of an antisense oligomer that will specifically hybridize to a target nucleic acid and induce a desired effect.

[0193] “Target nucleic acid,” “target RNA,” and “target RNA transcript” and “nucleic acid target” all can mean a nucleic acid capable of being targeted by antisense oligomers. In certain embodiments, the target nucleic acid is a UBE2A nucleic acid.

[0194] “Target region” can mean a portion of a target nucleic acid to which one or more antisense oligomers is targeted.

[0195] “Target segment” can mean the sequence of nucleotides of a target nucleic acid to which an antisense oligomer is targeted. “5′ target site” refers to the 5′-most nucleotide of a target segment. “3′ target site” refers to the 3′-most nucleotide of a target segment.

[0196] “Therapeutically effective amount” can mean an amount of a pharmaceutical agent that provides a therapeutic benefit to an individual. “Treat” or “treating” or “treatment” can refer to administering a composition to effect an alteration or improvement of the disorder or syndrome.

[0197] “Unmodified nucleobases” can mean the purine bases adenine (A) and guanine (G), and the pyrimidine bases thymine (T), cytosine (C) and uracil (U).

[0198] “Unmodified nucleotide” can mean a nucleotide composed of naturally occurring nucleobases, sugar moieties, and internucleoside linkages. In certain embodiments, an unmodified nucleotide is an RNA nucleotide (i.e., β-D-ribonucleosides) or a DNA nucleotide (i.e., β-D-deoxyribonucleoside).

[0199] “Wing segment” can mean a plurality of nucleosides modified to impart to an oligonucleotide properties such as enhanced inhibitory activity, increased binding affinity for a target nucleic acid, or resistance to degradation by in vivo nucleases.

[0200] In general, the present disclosure relates to agents (e.g., antisense oligomers, e.g., antisense oligonucleotides), compositions, kits, and methods that relate to modulation of UBE3A level in a mammalian cell. In some cases, the agent provided herein modulates a level of a processed mRNA transcript encoding a UBE3A protein in a mammalian cell. In some cases, provided herein are agents, compositions, kits, and methods that relate to reduction of expression of a UBE3A protein in a mammalian cell where the UBE3A is overexpressed, for instance, in a mammalian cell having duplication, overexpression, or a gain-of-function mutation, of a UBE3A gene that encodes the UBE3A protein.

### Target Nucleic Acids, Target Regions and Nucleotide Sequences

[0201] Ubiquitin-protein ligase E3A (UBE3A), also known as E6AP ubiquitin-protein ligase (E6AP), is an enzyme involved in targeting proteins for degradation within cells. In human, UBE3A protein is encoded the UBE3A gene. The UBE3A gene is located on the long (q) arm of chromosome 15, 15q11.2, between positions 11 and 13. In cells, UBE3A protein can attach ubiquitin to proteins to be degraded by ubiquitin-proteasome degradation mechanism. Upon ubiquitin tagging, proteins can be recognized and digested by proteasomes. In humans, both copies of the UBE3A gene can be active in most of the body's tissues. However, in most neurons, only the maternal copy of UBE3A gene is normally active.

[0202] Nucleotide sequences that encode UBE3A include, without limitation, the complement of location 25333728 to 25439056 of GENBANK Accession No. NC_000015.10, or the complement of location 556325..658147 of GENBANK Accession No. NG_002690.1. Nucleotide sequences that encode UBE3A include, without limitation, those listed in Table 1. Nucleotide sequences that encode UBE3A include, without limitation, those any of the mRNA transcripts listed in Table 2. It is understood that the sequence set forth in each SEQ ID NO in Table 1 and Examples contained herein is independent of any modification to a sugar moiety, an internucleoside linkage, or a nucleobase. As such, antisense oligomers defined by a SEQ ID NO can comprise, independently, one or more modifications to a sugar moiety, an intemucleoside linkage, or a nucleobase.

[0203] In some cases, an agent (e.g., an antisense oligomer) provided herein comprises a polynucleotide sequence that is at least 80% complementary to at least 8 contiguous nucleic acids of the sequence set forth in any one of SEQ ID NO: 93-120. In some cases, an agent (e.g., an antisense oligomer) provided herein comprises a polynucleotide sequence that is at least 85%, 90%, 95%, 98%, or 100% complementary to at least 8 contiguous nucleic acids of the sequence set forth in any one of SEQ ID NO: 93-120. In some cases, an agent (e.g., an antisense oligomer) provided herein comprises a polynucleotide sequence that is 100% complementary to at least 8 contiguous nucleic acids of the sequence set forth in any one of SEQ ID NO: 93-120.

[0204] In some cases, an agent (e.g., an antisense oligomer) provided herein comprises a polynucleotide sequence that is at least 80% complementary to at least 8 contiguous nucleic acids of an mRNA transcript listed in Table 2. In some cases, an agent (e.g., an antisense oligomer) provided herein comprises a polynucleotide sequence that is at least 85%, 90%, 95%, 98%, or 100% complementary to at least 8 contiguous nucleic acids of an mRNA transcript listed in Table 2. In some cases, an agent (e.g., an antisense oligomer) provided herein comprises a polynucleotide sequence that is 100% complementary to at least 8 contiguous nucleic acids of an mRNA transcript listed in Table 2.

[0205] In certain embodiments, a target region is a structurally defined region of the target nucleic acid. For example, a target region can encompass a 3′ UTR, a 5′ UTR, an exon, an intron, an exon/intron junction, a coding region, a translation initiation region, translation termination region, or other defined nucleic acid region. The structurally defined regions for UBE3A can be obtained by accession number from sequence databases such as NCBI and such information is incorporated herein by reference. In certain embodiments, a target region encompasses the sequence from a 5′ target site of one target segment within the target region to a 3′ target site of another target segment within the same target region.

[0206] Targeting can include determination of at least one target segment to which an antisense oligomer hybridizes, such that a desired effect (e.g., degradation of the mRNA transcript that contains the at least one target segment) occurs. In certain embodiments, the desired effect is a reduction in mRNA target nucleic acid levels. In certain embodiments, the desired effect is reduction of levels of protein encoded by the target nucleic acid or a phenotypic change associated with the target nucleic acid.

[0207] A target region can contain one or more target segments. Multiple target segments within a target region can be overlapping. Alternatively, they can be non-overlapping. In certain embodiments, target segments within a target region are separated by no more than about 300 nucleotides. In certain embodiments, target segments within a target region are separated by a number of nucleotides that is, is about, is no more than, is no more than about, 250, 200, 150, 100, 90, 80, 70, 60, 50, 40, 30, 20, or 10 nucleotides on the target nucleic acid, or is a range defined by any two of the preceding values. In certain embodiments, target segments within a target region are separated by no more than, or no more than about, 5 nucleotides on the target nucleic acid. In certain embodiments, target segments are contiguous. Contemplated are target regions defined by a range having a starting nucleic acid that is any of the 5′ target sites or 3′ target sites listed herein.

[0208] In some embodiments, hybridization occurs between an antisense oligomer disclosed herein and a UBE3A nucleic acid. The most common mechanism of hybridization involves hydrogen bonding (e.g., Watson-Crick, Hoogsteen or reversed Hoogsteen hydrogen bonding) between complementary nucleobases of the nucleic acid molecules.

[0209] Hybridization can occur under varying conditions. Stringent conditions are sequence-dependent and are determined by the nature and composition of the nucleic acid molecules to be hybridized.

[0210] Methods of determining whether a sequence is specifically hybridizable to a target nucleic acid are well known in the art. In certain embodiments, the antisense oligomers provided herein are specifically hybridizable with a UBE3A nucleic acid.

TABLE 1
Certain UBE3A Nucleic Acid Sequences
that an Agent Provided Herein Targets

| GENBANK Accession No. | SEQ ID NO |
|---|---|
| NM_000462.5 | 93 |
| NM_001354505.1 | 94 |
| NM_001354506.2 | 95 |
| NM_001354507.2 | 96 |
| NM_001354508.2 | 97 |
| NM_001354509.2 | 98 |
| NM_001354511.2 | 99 |
| NM_001354512.2 | 100 |
| NM_001354513.2 | 101 |
| NM_001354523.2 | 102 |
| NM_001354526.1 | 103 |
| NM_001354538.2 | 104 |
| NM_001354539.2 | 105 |
| NM_001354540.2 | 106 |
| NM_001354541.2 | 107 |
| NM_001354542.2 | 108 |
| NM_001354543.2 | 109 |
| NM_001354544.2 | 110 |
| NM_001354545.2 | 111 |
| NM_001354546.2 | 112 |
| NM_001354547.2 | 113 |
| NM_001354548.2 | 114 |
| NM_001354549.2 | 115 |
| NM_001354550.2 | 116 |
| NM_001354551.2 | 117 |
| NM_001374461.1 | 118 |
| NM_130838.4 | 119 |
| NM_130839.5 | 120 |

TABLE 2
Certain UBE3A mRNA Transcripts that
an Agent Provided Herein Targets

| Ensembl Transcript ID* | SEQ ID NO. |
|---|---|
| ENST00000648336.2 | 121 |
| ENST00000638155.1 | 122 |
| ENST00000438097.6 | 123 |
| ENST00000638011.1 | 124 |
| ENST00000637886.1 | 125 |
| ENST00000650110.1 | 126 |
| ENST00000630424.2 | 127 |
| ENST00000649550.1 | 128 |
| ENST00000566215.5 | 129 |
| ENST00000428984.6 | 130 |
| ENST00000635914.1 | 131 |
| ENST00000636667.1 | 132 |
| ENST00000625778.3 | 133 |
| ENST00000675177.1 | 134 |
| ENST00000629252.2 | 135 |
| ENST00000630907.2 | 136 |
| ENST00000628267.2 | 137 |
| ENST00000628733.2 | 138 |
| ENST00000625681.2 | 139 |
| ENST00000604860.3 | 140 |
| ENST00000626176.2 | 141 |
| ENST00000629886.2 | 142 |
| ENST00000628890.1 | 143 |
| ENST00000626589.2 | 144 |
| ENST00000676452.1 | 145 |
| ENST00000631247.1 | 146 |
| ENST00000626793.2 | 147 |
| ENST00000627018.1 | 148 |
| ENST00000675593.1 | 149 |
| ENST00000675000.1 | 150 |
| ENST00000675038.1 | 151 |
| ENST00000630607.2 | 152 |
| ENST00000626068.2 | 153 |

*Sequences of the listed transcripts are retrievable by searching the Transcript ID on e!Ensembl (useast.ensembl.org/index.html).

### Antisense Oligomers

[0211] In some aspects, the agent provided herein is an antisense oligomer. Antisense oligomers provided herein can include, but are not limited to, oligonucleotides, oligonucleosides, oligonucleotide analogs, oligonucleotide mimetics, antisense oligomers, antisense oligonucleotides, and siRNAs.

[0212] In certain embodiments, an antisense oligomer has a nucleobase sequence that, when written in the 5′ to 3′ direction, comprises the reverse complement of the target segment of a target nucleic acid to which it is designed to target. In certain such embodiments, an antisense oligonucleotide has a nucleobase sequence that, when written in the 5′ to 3′ direction, comprises the reverse complement of the target segment of a target nucleic acid to which it is designed to target.

[0213] In some cases, an agent provided herein comprises an antisense oligomer, and the antisense oligomer comprises a sequence with at least 80% identity to the sequence set forth in any one of SEQ ID NO: 1-92. In some cases, an agent provided herein comprises an antisense oligomer, and the antisense oligomer comprises a sequence with at least 90% identity to the sequence set forth in any one of SEQ ID NO: 1-92. In some cases, the antisense oligomer comprises a sequence with 100% identity to the sequence set forth in any one of SEQ ID NO: 1-92. In some cases, the antisense oligomer consists of a sequence with at least 80% identity to the sequence set forth in any one of SEQ ID NO: 1-92. In some cases, the antisense oligomer consists of a sequence with at least 90% identity to the sequence set forth in any one of SEQ ID NO: 1-92. In some cases, the antisense oligomer consists of a sequence with 100% identity to the sequence set forth in any one of SEQ ID NO: 1-92.

[0214] In some cases, an agent provided herein comprises an antisense oligomer, and the antisense oligomer comprises the sequence set forth in any one of SEQ ID NO: 1-92, with 0 to 4 nucleic acid substitutions. In some cases, an agent provided herein comprises an antisense oligomer, and the antisense oligomer comprises the sequence set forth in any one of SEQ ID NO: 1-92, with 0 to 3 nucleic acid substitutions. In some cases, an agent provided herein comprises an antisense oligomer, and the antisense oligomer comprises the sequence set forth in any one of SEQ ID NO: 1-92, with 0 to 2 nucleic acid substitutions. In some cases, an agent provided herein comprises an antisense oligomer, and the antisense oligomer comprises the sequence set forth in any one of SEQ ID NO: 1-92, with 0 to 1 nucleic acid substitution.

[0215] In some cases, an antisense oligomer provided herein comprises a sequence with at least 90%, 92%, 95%, 98%, or 100% identity to the sequence of SEQ ID NO: 1. In some cases, an antisense oligomer provided herein comprises the sequence of SEQ ID NO: 1.

[0216] In some cases, an antisense oligomer provided herein comprises a sequence with at least 90%, 92%, 95%, 98%, or 100% identity to the sequence of SEQ ID NO: 2. In some cases, an antisense oligomer provided herein comprises the sequence of SEQ ID NO: 2.

[0217] In some cases, an antisense oligomer provided herein comprises a sequence with at least 90%, 92%, 95%, 98%, or 100% identity to the sequence of SEQ ID NO: 3. In some cases, an antisense oligomer provided herein comprises the sequence of SEQ ID NO: 3.

[0218] In some cases, an antisense oligomer provided herein comprises a sequence with at least 90%, 92%, 95%, 98%, or 100% identity to the sequence of SEQ ID NO: 4. In some cases, an antisense oligomer provided herein comprises the sequence of SEQ ID NO: 4.

[0219] In some cases, an antisense oligomer provided herein comprises a sequence with at least 90%, 92%, 95%, 98%, or 100% identity to the sequence of SEQ ID NO: 5. In some cases, an antisense oligomer provided herein comprises the sequence of SEQ ID NO: 5.

[0220] In some cases, an antisense oligomer provided herein comprises a sequence with at least 90%, 92%, 95%, 98%, or 100% identity to the sequence of SEQ ID NO: 6. In some cases, an antisense oligomer provided herein comprises the sequence of SEQ ID NO: 6.

[0221] In some cases, an antisense oligomer provided herein comprises a sequence with at least 90%, 92%, 95%, 98%, or 100% identity to the sequence of SEQ ID NO: 7. In some cases, an antisense oligomer provided herein comprises the sequence of SEQ ID NO: 7.

[0222] In some cases, an antisense oligomer provided herein comprises a sequence with at least 90%, 92%, 95%, 98%, or 100% identity to the sequence of SEQ ID NO: 8. In some cases, an antisense oligomer provided herein comprises the sequence of SEQ ID NO: 8.

[0223] In some cases, an antisense oligomer provided herein comprises a sequence with at least 90%, 92%, 95%, 98%, or 100% identity to the sequence of SEQ ID NO: 9. In some cases, an antisense oligomer provided herein comprises the sequence of SEQ ID NO: 9.

[0224] In some cases, an antisense oligomer provided herein comprises a sequence with at least 90%, 92%, 95%, 98%, or 100% identity to the sequence of SEQ ID NO: 10. In some cases, an antisense oligomer provided herein comprises the sequence of SEQ ID NO: 10.

[0225] In some cases, an antisense oligomer provided herein comprises a sequence with at least 90%, 92%, 95%, 98%, or 100% identity to the sequence of SEQ ID NO: 11. In some cases, an antisense oligomer provided herein comprises the sequence of SEQ ID NO: 11.

[0226] In some cases, an antisense oligomer provided herein comprises a sequence with at least 90%, 92%, 95%, 98%, or 100% identity to the sequence of SEQ ID NO: 12. In some cases, an antisense oligomer provided herein comprises the sequence of SEQ ID NO: 12.

[0227] In some cases, an antisense oligomer provided herein comprises a sequence with at least 90%, 92%, 95%, 98%, or 100% identity to the sequence of SEQ ID NO: 13. In some cases, an antisense oligomer provided herein comprises the sequence of SEQ ID NO: 13.

[0228] In some cases, an antisense oligomer provided herein comprises a sequence with at least 90%, 92%, 95%, 98%, or 100% identity to the sequence of SEQ ID NO: 14. In some cases, an antisense oligomer provided herein comprises the sequence of SEQ ID NO: 14.

[0229] In some cases, an antisense oligomer provided herein comprises a sequence with at least 90%, 92%, 95%, 98%, or 100% identity to the sequence of SEQ ID NO: 15. In some cases, an antisense oligomer provided herein comprises the sequence of SEQ ID NO: 15.

[0230] In some cases, an antisense oligomer provided herein comprises a sequence with at least 90%, 92%, 95%, 98%, or 100% identity to the sequence of SEQ ID NO: 16. In some cases, an antisense oligomer provided herein comprises the sequence of SEQ ID NO: 16.

[0231] In some cases, an antisense oligomer provided herein comprises a sequence with at least 90%, 92%, 95%, 98%, or 100% identity to the sequence of SEQ ID NO: 17. In some cases, an antisense oligomer provided herein comprises the sequence of SEQ ID NO: 17.

[0232] In some cases, an antisense oligomer provided herein comprises a sequence with at least 90%, 92%, 95%, 98%, or 100% identity to the sequence of SEQ ID NO: 18. In some cases, an antisense oligomer provided herein comprises the sequence of SEQ ID NO: 18.

[0233] In some cases, an antisense oligomer provided herein comprises a sequence with at least 90%, 92%, 95%, 98%, or 100% identity to the sequence of SEQ ID NO: 19. In some cases, an antisense oligomer provided herein comprises the sequence of SEQ ID NO: 19.

[0234] In some cases, an antisense oligomer provided herein comprises a sequence with at least 90%, 92%, 95%, 98%, or 100% identity to the sequence of SEQ ID NO: 20. In some cases, an antisense oligomer provided herein comprises the sequence of SEQ ID NO: 20.

[0235] In some cases, an antisense oligomer provided herein comprises a sequence with at least 90%, 92%, 95%, 98%, or 100% identity to the sequence of SEQ ID NO: 21. In some cases, an antisense oligomer provided herein comprises the sequence of SEQ ID NO: 21.

[0236] In some cases, an antisense oligomer provided herein comprises a sequence with at least 90%, 92%, 95%, 98%, or 100% identity to the sequence of SEQ ID NO: 22. In some cases, an antisense oligomer provided herein comprises the sequence of SEQ ID NO: 22.

[0237] In some cases, an antisense oligomer provided herein comprises a sequence with at least 90%, 92%, 95%, 98%, or 100% identity to the sequence of SEQ ID NO: 23. In some cases, an antisense oligomer provided herein comprises the sequence of SEQ ID NO: 23.

[0238] In some cases, an antisense oligomer provided herein comprises a sequence with at least 90%, 92%, 95%, 98%, or 100% identity to the sequence of SEQ ID NO: 24. In some cases, an antisense oligomer provided herein comprises the sequence of SEQ ID NO: 24.

[0239] In some cases, an antisense oligomer provided herein comprises a sequence with at least 90%, 92%, 95%, 98%, or 100% identity to the sequence of SEQ ID NO: 25. In some cases, an antisense oligomer provided herein comprises the sequence of SEQ ID NO: 25.

[0240] In some cases, an antisense oligomer provided herein comprises a sequence with at least 90%, 92%, 95%, 98%, or 100% identity to the sequence of SEQ ID NO: 26. In some cases, an antisense oligomer provided herein comprises the sequence of SEQ ID NO: 26.

[0241] In some cases, an antisense oligomer provided herein comprises a sequence with at least 90%, 92%, 95%, 98%, or 100% identity to the sequence of SEQ ID NO: 27. In some cases, an antisense oligomer provided herein comprises the sequence of SEQ ID NO: 27.

[0242] In some cases, an antisense oligomer provided herein comprises a sequence with at least 90%, 92%, 95%, 98%, or 100% identity to the sequence of SEQ ID NO: 28. In some cases, an antisense oligomer provided herein comprises the sequence of SEQ ID NO: 28.

[0243] In some cases, an antisense oligomer provided herein comprises a sequence with at least 90%, 92%, 95%, 98%, or 100% identity to the sequence of SEQ ID NO: 29. In some cases, an antisense oligomer provided herein comprises the sequence of SEQ ID NO: 29.

[0244] In some cases, an antisense oligomer provided herein comprises a sequence with at least 90%, 92%, 95%, 98%, or 100% identity to the sequence of SEQ ID NO: 30. In some cases, an antisense oligomer provided herein comprises the sequence of SEQ ID NO: 30.

[0245] In some cases, an antisense oligomer provided herein comprises a sequence with at least 90%, 92%, 95%, 98%, or 100% identity to the sequence of SEQ ID NO: 31. In some cases, an antisense oligomer provided herein comprises the sequence of SEQ ID NO: 31.

[0246] In some cases, an antisense oligomer provided herein comprises a sequence with at least 90%, 92%, 95%, 98%, or 100% identity to the sequence of SEQ ID NO: 32. In some cases, an antisense oligomer provided herein comprises the sequence of SEQ ID NO: 32.

[0247] In some cases, an antisense oligomer provided herein comprises a sequence with at least 90%, 92%, 95%, 98%, or 100% identity to the sequence of SEQ ID NO: 33. In some cases, an antisense oligomer provided herein comprises the sequence of SEQ ID NO: 33.

[0248] In some cases, an antisense oligomer provided herein comprises a sequence with at least 90%, 92%, 95%, 98%, or 100% identity to the sequence of SEQ ID NO: 34. In some cases, an antisense oligomer provided herein comprises the sequence of SEQ ID NO: 34.

[0249] In some cases, an antisense oligomer provided herein comprises a sequence with at least 90%, 92%, 95%, 98%, or 100% identity to the sequence of SEQ ID NO: 35. In some cases, an antisense oligomer provided herein comprises the sequence of SEQ ID NO: 35.

[0250] In some cases, an antisense oligomer provided herein comprises a sequence with at least 90%, 92%, 95%, 98%, or 100% identity to the sequence of SEQ ID NO: 36. In some cases, an antisense oligomer provided herein comprises the sequence of SEQ ID NO: 36.

[0251] In some cases, an antisense oligomer provided herein comprises a sequence with at least 90%, 92%, 95%, 98%, or 100% identity to the sequence of SEQ ID NO: 37. In some cases, an antisense oligomer provided herein comprises the sequence of SEQ ID NO: 37.

[0252] In some cases, an antisense oligomer provided herein comprises a sequence with at least 90%, 92%, 95%, 98%, or 100% identity to the sequence of SEQ ID NO: 38. In some cases, an antisense oligomer provided herein comprises the sequence of SEQ ID NO: 38.

[0253] In some cases, an antisense oligomer provided herein comprises a sequence with at least 90%, 92%, 95%, 98%, or 100% identity to the sequence of SEQ ID NO: 39. In some cases, an antisense oligomer provided herein comprises the sequence of SEQ ID NO: 39.

[0254] In some cases, an antisense oligomer provided herein comprises a sequence with at least 90%, 92%, 95%, 98%, or 100% identity to the sequence of SEQ ID NO: 40. In some cases, an antisense oligomer provided herein comprises the sequence of SEQ ID NO: 40.

[0255] In some cases, an antisense oligomer provided herein comprises a sequence with at least 90%, 92%, 95%, 98%, or 100% identity to the sequence of SEQ ID NO: 41. In some cases, an antisense oligomer provided herein comprises the sequence of SEQ ID NO: 41.

[0256] In some cases, an antisense oligomer provided herein comprises a sequence with at least 90%, 92%, 95%, 98%, or 100% identity to the sequence of SEQ ID NO: 42. In some cases, an antisense oligomer provided herein comprises the sequence of SEQ ID NO: 42.

[0257] In some cases, an antisense oligomer provided herein comprises a sequence with at least 90%, 92%, 95%, 98%, or 100% identity to the sequence of SEQ ID NO: 43. In some cases, an antisense oligomer provided herein comprises the sequence of SEQ ID NO: 43.

[0258] In some cases, an antisense oligomer provided herein comprises a sequence with at least 90%, 92%, 95%, 98%, or 100% identity to the sequence of SEQ ID NO: 44. In some cases, an antisense oligomer provided herein comprises the sequence of SEQ ID NO: 44.

[0259] In some cases, an antisense oligomer provided herein comprises a sequence with at least 90%, 92%, 95%, 98%, or 100% identity to the sequence of SEQ ID NO: 45. In some cases, an antisense oligomer provided herein comprises the sequence of SEQ ID NO: 45.

[0260] In some cases, an antisense oligomer provided herein comprises a sequence with at least 90%, 92%, 95%, 98%, or 100% identity to the sequence of SEQ ID NO: 46. In some cases, an antisense oligomer provided herein comprises the sequence of SEQ ID NO: 46.

[0261] In some cases, an antisense oligomer provided herein comprises a sequence with at least 90%, 92%, 95%, 98%, or 100% identity to the sequence of SEQ ID NO: 47. In some cases, an antisense oligomer provided herein comprises the sequence of SEQ ID NO: 47.

[0262] In some cases, an antisense oligomer provided herein comprises a sequence with at least 90%, 92%, 95%, 98%, or 100% identity to the sequence of SEQ ID NO: 48. In some cases, an antisense oligomer provided herein comprises the sequence of SEQ ID NO: 48.

[0263] In some cases, an antisense oligomer provided herein comprises a sequence with at least 90%, 92%, 95%, 98%, or 100% identity to the sequence of SEQ ID NO: 49. In some cases, an antisense oligomer provided herein comprises the sequence of SEQ ID NO: 49.

[0264] In some cases, an antisense oligomer provided herein comprises a sequence with at least 90%, 92%, 95%, 98%, or 100% identity to the sequence of SEQ ID NO: 50. In some cases, an antisense oligomer provided herein comprises the sequence of SEQ ID NO: 50.

[0265] In some cases, an antisense oligomer provided herein comprises a sequence with at least 90%, 92%, 95%, 98%, or 100% identity to the sequence of SEQ ID NO: 51. In some cases, an antisense oligomer provided herein comprises the sequence of SEQ ID NO: 51.

[0266] In some cases, an antisense oligomer provided herein comprises a sequence with at least 90%, 92%, 95%, 98%, or 100% identity to the sequence of SEQ ID NO: 52. In some cases, an antisense oligomer provided herein comprises the sequence of SEQ ID NO: 52.

[0267] In some cases, an antisense oligomer provided herein comprises a sequence with at least 90%, 92%, 95%, 98%, or 100% identity to the sequence of SEQ ID NO: 53. In some cases, an antisense oligomer provided herein comprises the sequence of SEQ ID NO: 53.

[0268] In some cases, an antisense oligomer provided herein comprises a sequence with at least 90%, 92%, 95%, 98%, or 100% identity to the sequence of SEQ ID NO: 54. In some cases, an antisense oligomer provided herein comprises the sequence of SEQ ID NO: 54.

[0269] In some cases, an antisense oligomer provided herein comprises a sequence with at least 90%, 92%, 95%, 98%, or 100% identity to the sequence of SEQ ID NO: 55. In some cases, an antisense oligomer provided herein comprises the sequence of SEQ ID NO: 55.

[0270] In some cases, an antisense oligomer provided herein comprises a sequence with at least 90%, 92%, 95%, 98%, or 100% identity to the sequence of SEQ ID NO: 56. In some cases, an antisense oligomer provided herein comprises the sequence of SEQ ID NO: 56.

[0271] In some cases, an antisense oligomer provided herein comprises a sequence with at least 90%, 92%, 95%, 98%, or 100% identity to the sequence of SEQ ID NO: 57. In some cases, an antisense oligomer provided herein comprises the sequence of SEQ ID NO: 57.

[0272] In some cases, an antisense oligomer provided herein comprises a sequence with at least 90%, 92%, 95%, 98%, or 100% identity to the sequence of SEQ ID NO: 58. In some cases, an antisense oligomer provided herein comprises the sequence of SEQ ID NO: 58.

[0273] In some cases, an antisense oligomer provided herein comprises a sequence with at least 90%, 92%, 95%, 98%, or 100% identity to the sequence of SEQ ID NO: 59. In some cases, an antisense oligomer provided herein comprises the sequence of SEQ ID NO: 59.

[0274] In some cases, an antisense oligomer provided herein comprises a sequence with at least 90%, 92%, 95%, 98%, or 100% identity to the sequence of SEQ ID NO: 60. In some cases, an antisense oligomer provided herein comprises the sequence of SEQ ID NO: 60.

[0275] In some cases, an antisense oligomer provided herein comprises a sequence with at least 90%, 92%, 95%, 98%, or 100% identity to the sequence of SEQ ID NO: 61. In some cases, an antisense oligomer provided herein comprises the sequence of SEQ ID NO: 61.

[0276] In some cases, an antisense oligomer provided herein comprises a sequence with at least 90%, 92%, 95%, 98%, or 100% identity to the sequence of SEQ ID NO: 62. In some cases, an antisense oligomer provided herein comprises the sequence of SEQ ID NO: 62.

[0277] In some cases, an antisense oligomer provided herein comprises a sequence with at least 90%, 92%, 95%, 98%, or 100% identity to the sequence of SEQ ID NO: 63. In some cases, an antisense oligomer provided herein comprises the sequence of SEQ ID NO: 63.

[0278] In some cases, an antisense oligomer provided herein comprises a sequence with at least 90%, 92%, 95%, 98%, or 100% identity to the sequence of SEQ ID NO: 64. In some cases, an antisense oligomer provided herein comprises the sequence of SEQ ID NO: 64.

[0279] In some cases, an antisense oligomer provided herein comprises a sequence with at least 90%, 92%, 95%, 98%, or 100% identity to the sequence of SEQ ID NO: 65. In some cases, an antisense oligomer provided herein comprises the sequence of SEQ ID NO: 65.

[0280] In some cases, an antisense oligomer provided herein comprises a sequence with at least 90%, 92%, 95%, 98%, or 100% identity to the sequence of SEQ ID NO: 66. In some cases, an antisense oligomer provided herein comprises the sequence of SEQ ID NO: 66.

[0281] In some cases, an antisense oligomer provided herein comprises a sequence with at least 90%, 92%, 95%, 98%, or 100% identity to the sequence of SEQ ID NO: 67. In some cases, an antisense oligomer provided herein comprises the sequence of SEQ ID NO: 67.

[0282] In some cases, an antisense oligomer provided herein comprises a sequence with at least 90%, 92%, 95%, 98%, or 100% identity to the sequence of SEQ ID NO: 68. In some cases, an antisense oligomer provided herein comprises the sequence of SEQ ID NO: 68.

[0283] In some cases, an antisense oligomer provided herein comprises a sequence with at least 90%, 92%, 95%, 98%, or 100% identity to the sequence of SEQ ID NO: 69. In some cases, an antisense oligomer provided herein comprises the sequence of SEQ ID NO: 69.

[0284] In some cases, an antisense oligomer provided herein comprises a sequence with at least 90%, 92%, 95%, 98%, or 100% identity to the sequence of SEQ ID NO: 70. In some cases, an antisense oligomer provided herein comprises the sequence of SEQ ID NO: 70.

[0285] In some cases, an antisense oligomer provided herein comprises a sequence with at least 90%, 92%, 95%, 98%, or 100% identity to the sequence of SEQ ID NO: 71. In some cases, an antisense oligomer provided herein comprises the sequence of SEQ ID NO: 71.

[0286] In some cases, an antisense oligomer provided herein comprises a sequence with at least 90%, 92%, 95%, 98%, or 100% identity to the sequence of SEQ ID NO: 72. In some cases, an antisense oligomer provided herein comprises the sequence of SEQ ID NO: 72.

[0287] In some cases, an antisense oligomer provided herein comprises a sequence with at least 90%, 92%, 95%, 98%, or 100% identity to the sequence of SEQ ID NO: 73. In some cases, an antisense oligomer provided herein comprises the sequence of SEQ ID NO: 73.

[0288] In some cases, an antisense oligomer provided herein comprises a sequence with at least 90%, 92%, 95%, 98%, or 100% identity to the sequence of SEQ ID NO: 74. In some cases, an antisense oligomer provided herein comprises the sequence of SEQ ID NO: 74.

[0289] In some cases, an antisense oligomer provided herein comprises a sequence with at least 90%, 92%, 95%, 98%, or 100% identity to the sequence of SEQ ID NO: 75. In some cases, an antisense oligomer provided herein comprises the sequence of SEQ ID NO: 75.

[0290] In some cases, an antisense oligomer provided herein comprises a sequence with at least 90%, 92%, 95%, 98%, or 100% identity to the sequence of SEQ ID NO: 76. In some cases, an antisense oligomer provided herein comprises the sequence of SEQ ID NO: 76.

[0291] In some cases, an antisense oligomer provided herein comprises a sequence with at least 90%, 92%, 95%, 98%, or 100% identity to the sequence of SEQ ID NO: 77. In some cases, an antisense oligomer provided herein comprises the sequence of SEQ ID NO: 77.

[0292] In some cases, an antisense oligomer provided herein comprises a sequence with at least 90%, 92%, 95%, 98%, or 100% identity to the sequence of SEQ ID NO: 78. In some cases, an antisense oligomer provided herein comprises the sequence of SEQ ID NO: 78.

[0293] In some cases, an antisense oligomer provided herein comprises a sequence with at least 90%, 92%, 95%, 98%, or 100% identity to the sequence of SEQ ID NO: 79. In some cases, an antisense oligomer provided herein comprises the sequence of SEQ ID NO: 79.

[0294] In some cases, an antisense oligomer provided herein comprises a sequence with at least 90%, 92%, 95%, 98%, or 100% identity to the sequence of SEQ ID NO: 80. In some cases, an antisense oligomer provided herein comprises the sequence of SEQ ID NO: 80.

[0295] In some cases, an antisense oligomer provided herein comprises a sequence with at least 90%, 92%, 95%, 98%, or 100% identity to the sequence of SEQ ID NO: 81. In some cases, an antisense oligomer provided herein comprises the sequence of SEQ ID NO: 81.

[0296] In some cases, an antisense oligomer provided herein comprises a sequence with at least 90%, 92%, 95%, 98%, or 100% identity to the sequence of SEQ ID NO: 82. In some cases, an antisense oligomer provided herein comprises the sequence of SEQ ID NO: 82.

[0297] In some cases, an antisense oligomer provided herein comprises a sequence with at least 90%, 92%, 95%, 98%, or 100% identity to the sequence of SEQ ID NO: 83. In some cases, an antisense oligomer provided herein comprises the sequence of SEQ ID NO: 83.

[0298] In some cases, an antisense oligomer provided herein comprises a sequence with at least 90%, 92%, 95%, 98%, or 100% identity to the sequence of SEQ ID NO: 84. In some cases, an antisense oligomer provided herein comprises the sequence of SEQ ID NO: 84.

[0299] In some cases, an antisense oligomer provided herein comprises a sequence with at least 90%, 92%, 95%, 98%, or 100% identity to the sequence of SEQ ID NO: 85. In some cases, an antisense oligomer provided herein comprises the sequence of SEQ ID NO: 85.

[0300] In some cases, an antisense oligomer provided herein comprises a sequence with at least 90%, 92%, 95%, 98%, or 100% identity to the sequence of SEQ ID NO: 86. In some cases, an antisense oligomer provided herein comprises the sequence of SEQ ID NO: 86.

[0301] In some cases, an antisense oligomer provided herein comprises a sequence with at least 90%, 92%, 95%, 98%, or 100% identity to the sequence of SEQ ID NO: 87. In some cases, an antisense oligomer provided herein comprises the sequence of SEQ ID NO: 87.

[0302] In some cases, an antisense oligomer provided herein comprises a sequence with at least 90%, 92%, 95%, 98%, or 100% identity to the sequence of SEQ ID NO: 88. In some cases, an antisense oligomer provided herein comprises the sequence of SEQ ID NO: 88.

[0303] In some cases, an antisense oligomer provided herein comprises a sequence with at least 90%, 92%, 95%, 98%, or 100% identity to the sequence of SEQ ID NO: 89. In some cases, an antisense oligomer provided herein comprises the sequence of SEQ ID NO: 89.

[0304] In some cases, an antisense oligomer provided herein comprises a sequence with at least 90%, 92%, 95%, 98%, or 100% identity to the sequence of SEQ ID NO: 90. In some cases, an antisense oligomer provided herein comprises the sequence of SEQ ID NO: 90.

[0305] In some cases, an antisense oligomer provided herein comprises a sequence with at least 90%, 92%, 95%, 98%, or 100% identity to the sequence of SEQ ID NO: 91. In some cases, an antisense oligomer provided herein comprises the sequence of SEQ ID NO: 91.

[0306] In some cases, an antisense oligomer provided herein comprises a sequence with at least 90%, 92%, 95%, 98%, or 100% identity to the sequence of SEQ ID NO: 92. In some cases, an antisense oligomer provided herein comprises the sequence of SEQ ID NO: 92.

[0307] In some cases, an antisense oligomer provided herein comprises the sequence of SEQ ID NO: 1, with 0 to 4 nucleic acid substitutions. In some cases, an antisense oligomer provided herein comprises the sequence of SEQ ID NO: 1, with 0 to 3 nucleic acid substitutions. In some cases, an antisense oligomer provided herein comprises the sequence of SEQ ID NO: 1, with 0 to 2 nucleic acid substitutions. In some cases, an antisense oligomer provided herein comprises the sequence of SEQ ID NO: 1, with 0 to 1 nucleic acid substitution.

[0308] In some cases, an antisense oligomer provided herein comprises the sequence of SEQ ID NO: 2, with 0 to 4 nucleic acid substitutions. In some cases, an antisense oligomer provided herein comprises the sequence of SEQ ID NO: 2, with 0 to 3 nucleic acid substitutions. In some cases, an antisense oligomer provided herein comprises the sequence of SEQ ID NO: 2, with 0 to 2 nucleic acid substitutions. In some cases, an antisense oligomer provided herein comprises the sequence of SEQ ID NO: 2, with 0 to 1 nucleic acid substitution.

[0309] In some cases, an antisense oligomer provided herein comprises the sequence of SEQ ID NO: 3, with 0 to 4 nucleic acid substitutions. In some cases, an antisense oligomer provided herein comprises the sequence of SEQ ID NO: 3, with 0 to 3 nucleic acid substitutions. In some cases, an antisense oligomer provided herein comprises the sequence of SEQ ID NO: 3, with 0 to 2 nucleic acid substitutions. In some cases, an antisense oligomer provided herein comprises the sequence of SEQ ID NO: 3, with 0 to 1 nucleic acid substitution.

[0310] In some cases, an antisense oligomer provided herein comprises the sequence of SEQ ID NO: 4, with 0 to 4 nucleic acid substitutions. In some cases, an antisense oligomer provided herein comprises the sequence of SEQ ID NO: 4, with 0 to 3 nucleic acid substitutions. In some cases, an antisense oligomer provided herein comprises the sequence of SEQ ID NO: 4, with 0 to 2 nucleic acid substitutions. In some cases, an antisense oligomer provided herein comprises the sequence of SEQ ID NO: 4, with 0 to 1 nucleic acid substitution.

[0311] In some cases, an antisense oligomer provided herein comprises the sequence of SEQ ID NO: 5, with 0 to 4 nucleic acid substitutions. In some cases, an antisense oligomer provided herein comprises the sequence of SEQ ID NO: 5, with 0 to 3 nucleic acid substitutions. In some cases, an antisense oligomer provided herein comprises the sequence of SEQ ID NO: 5, with 0 to 2 nucleic acid substitutions. In some cases, an antisense oligomer provided herein comprises the sequence of SEQ ID NO: 5, with 0 to 1 nucleic acid substitution.

[0312] In some cases, an antisense oligomer provided herein comprises the sequence of SEQ ID NO: 6, with 0 to 4 nucleic acid substitutions. In some cases, an antisense oligomer provided herein comprises the sequence of SEQ ID NO: 6, with 0 to 3 nucleic acid substitutions. In some cases, an antisense oligomer provided herein comprises the sequence of SEQ ID NO: 6, with 0 to 2 nucleic acid substitutions. In some cases, an antisense oligomer provided herein comprises the sequence of SEQ ID NO: 6, with 0 to 1 nucleic acid substitution.

[0313] In some cases, an antisense oligomer provided herein comprises the sequence of SEQ ID NO: 7, with 0 to 4 nucleic acid substitutions. In some cases, an antisense oligomer provided herein comprises the sequence of SEQ ID NO: 7, with 0 to 3 nucleic acid substitutions. In some cases, an antisense oligomer provided herein comprises the sequence of SEQ ID NO: 7, with 0 to 2 nucleic acid substitutions. In some cases, an antisense oligomer provided herein comprises the sequence of SEQ ID NO: 7, with 0 to 1 nucleic acid substitution.

[0314] In some cases, an antisense oligomer provided herein comprises the sequence of SEQ ID NO: 8, with 0 to 4 nucleic acid substitutions. In some cases, an antisense oligomer provided herein comprises the sequence of SEQ ID NO: 8, with 0 to 3 nucleic acid substitutions. In some cases, an antisense oligomer provided herein comprises the sequence of SEQ ID NO: 8, with 0 to 2 nucleic acid substitutions. In some cases, an antisense oligomer provided herein comprises the sequence of SEQ ID NO: 8, with 0 to 1 nucleic acid substitution.

[0315] In some cases, an antisense oligomer provided herein comprises the sequence of SEQ ID NO: 9, with 0 to 4 nucleic acid substitutions. In some cases, an antisense oligomer provided herein comprises the sequence of SEQ ID NO: 9, with 0 to 3 nucleic acid substitutions. In some cases, an antisense oligomer provided herein comprises the sequence of SEQ ID NO: 9, with 0 to 2 nucleic acid substitutions. In some cases, an antisense oligomer provided herein comprises the sequence of SEQ ID NO: 9, with 0 to 1 nucleic acid substitution.

[0316] In some cases, an antisense oligomer provided herein comprises the sequence of SEQ ID NO: 10, with 0 to 4 nucleic acid substitutions. In some cases, an antisense oligomer provided herein comprises the sequence of SEQ ID NO: 10, with 0 to 3 nucleic acid substitutions. In some cases, an antisense oligomer provided herein comprises the sequence of SEQ ID NO: 10, with 0 to 2 nucleic acid substitutions. In some cases, an antisense oligomer provided herein comprises the sequence of SEQ ID NO: 10, with 0 to 1 nucleic acid substitution.

[0317] In some cases, an antisense oligomer provided herein comprises the sequence of SEQ ID NO: 11, with 0 to 4 nucleic acid substitutions. In some cases, an antisense oligomer provided herein comprises the sequence of SEQ ID NO: 11, with 0 to 3 nucleic acid substitutions. In some cases, an antisense oligomer provided herein comprises the sequence of SEQ ID NO: 11, with 0 to 2 nucleic acid substitutions. In some cases, an antisense oligomer provided herein comprises the sequence of SEQ ID NO: 11, with 0 to 1 nucleic acid substitution.

[0318] In some cases, an antisense oligomer provided herein comprises the sequence of SEQ ID NO: 12, with 0 to 4 nucleic acid substitutions. In some cases, an antisense oligomer provided herein comprises the sequence of SEQ ID NO: 12, with 0 to 3 nucleic acid substitutions. In some cases, an antisense oligomer provided herein comprises the sequence of SEQ ID NO: 12, with 0 to 2 nucleic acid substitutions. In some cases, an antisense oligomer provided herein comprises the sequence of SEQ ID NO: 12, with 0 to 1 nucleic acid substitution.

[0319] In some cases, an antisense oligomer provided herein comprises the sequence of SEQ ID NO: 13, with 0 to 4 nucleic acid substitutions. In some cases, an antisense oligomer provided herein comprises the sequence of SEQ ID NO: 13, with 0 to 3 nucleic acid substitutions. In some cases, an antisense oligomer provided herein comprises the sequence of SEQ ID NO: 13, with 0 to 2 nucleic acid substitutions. In some cases, an antisense oligomer provided herein comprises the sequence of SEQ ID NO: 13, with 0 to 1 nucleic acid substitution.

[0320] In some cases, an antisense oligomer provided herein comprises the sequence of SEQ ID NO: 14, with 0 to 4 nucleic acid substitutions. In some cases, an antisense oligomer provided herein comprises the sequence of SEQ ID NO: 14, with 0 to 3 nucleic acid substitutions. In some cases, an antisense oligomer provided herein comprises the sequence of SEQ ID NO: 14, with 0 to 2 nucleic acid substitutions. In some cases, an antisense oligomer provided herein comprises the sequence of SEQ ID NO: 14, with 0 to 1 nucleic acid substitution.

[0321] In some cases, an antisense oligomer provided herein comprises the sequence of SEQ ID NO: 15, with 0 to 4 nucleic acid substitutions. In some cases, an antisense oligomer provided herein comprises the sequence of SEQ ID NO: 15, with 0 to 3 nucleic acid substitutions. In some cases, an antisense oligomer provided herein comprises the sequence of SEQ ID NO: 15, with 0 to 2 nucleic acid substitutions. In some cases, an antisense oligomer provided herein comprises the sequence of SEQ ID NO: 15, with 0 to 1 nucleic acid substitution.

[0322] In some cases, an antisense oligomer provided herein comprises the sequence of SEQ ID NO: 16, with 0 to 4 nucleic acid substitutions. In some cases, an antisense oligomer provided herein comprises the sequence of SEQ ID NO: 16, with 0 to 3 nucleic acid substitutions. In some cases, an antisense oligomer provided herein comprises the sequence of SEQ ID NO: 16, with 0 to 2 nucleic acid substitutions. In some cases, an antisense oligomer provided herein comprises the sequence of SEQ ID NO: 16, with 0 to 1 nucleic acid substitution.

[0323] In some cases, an antisense oligomer provided herein comprises the sequence of SEQ ID NO: 17, with 0 to 4 nucleic acid substitutions. In some cases, an antisense oligomer provided herein comprises the sequence of SEQ ID NO: 17, with 0 to 3 nucleic acid substitutions. In some cases, an antisense oligomer provided herein comprises the sequence of SEQ ID NO: 17, with 0 to 2 nucleic acid substitutions. In some cases, an antisense oligomer provided herein comprises the sequence of SEQ ID NO: 17, with 0 to 1 nucleic acid substitution.

[0324] In some cases, an antisense oligomer provided herein comprises the sequence of SEQ ID NO: 18, with 0 to 4 nucleic acid substitutions. In some cases, an antisense oligomer provided herein comprises the sequence of SEQ ID NO: 18, with 0 to 3 nucleic acid substitutions. In some cases, an antisense oligomer provided herein comprises the sequence of SEQ ID NO: 18, with 0 to 2 nucleic acid substitutions. In some cases, an antisense oligomer provided herein comprises the sequence of SEQ ID NO: 18, with 0 to 1 nucleic acid substitution.

[0325] In some cases, an antisense oligomer provided herein comprises the sequence of SEQ ID NO: 19, with 0 to 4 nucleic acid substitutions. In some cases, an antisense oligomer provided herein comprises the sequence of SEQ ID NO: 19, with 0 to 3 nucleic acid substitutions. In some cases, an antisense oligomer provided herein comprises the sequence of SEQ ID NO: 19, with 0 to 2 nucleic acid substitutions. In some cases, an antisense oligomer provided herein comprises the sequence of SEQ ID NO: 19, with 0 to 1 nucleic acid substitution.

[0326] In some cases, an antisense oligomer provided herein comprises the sequence of SEQ ID NO: 20, with 0 to 4 nucleic acid substitutions. In some cases, an antisense oligomer provided herein comprises the sequence of SEQ ID NO: 20, with 0 to 3 nucleic acid substitutions. In some cases, an antisense oligomer provided herein comprises the sequence of SEQ ID NO: 20, with 0 to 2 nucleic acid substitutions. In some cases, an antisense oligomer provided herein comprises the sequence of SEQ ID NO: 20, with 0 to 1 nucleic acid substitution.

[0327] In some cases, an antisense oligomer provided herein comprises the sequence of SEQ ID NO: 21, with 0 to 4 nucleic acid substitutions. In some cases, an antisense oligomer provided herein comprises the sequence of SEQ ID NO: 21, with 0 to 3 nucleic acid substitutions. In some cases, an antisense oligomer provided herein comprises the sequence of SEQ ID NO: 21, with 0 to 2 nucleic acid substitutions. In some cases, an antisense oligomer provided herein comprises the sequence of SEQ ID NO: 21, with 0 to 1 nucleic acid substitution.

[0328] In some cases, an antisense oligomer provided herein comprises the sequence of SEQ ID NO: 22, with 0 to 4 nucleic acid substitutions. In some cases, an antisense oligomer provided herein comprises the sequence of SEQ ID NO: 22, with 0 to 3 nucleic acid substitutions. In some cases, an antisense oligomer provided herein comprises the sequence of SEQ ID NO: 22, with 0 to 2 nucleic acid substitutions. In some cases, an antisense oligomer provided herein comprises the sequence of SEQ ID NO: 22, with 0 to 1 nucleic acid substitution.

[0329] In some cases, an antisense oligomer provided herein comprises the sequence of SEQ ID NO: 23, with 0 to 4 nucleic acid substitutions. In some cases, an antisense oligomer provided herein comprises the sequence of SEQ ID NO: 23, with 0 to 3 nucleic acid substitutions. In some cases, an antisense oligomer provided herein comprises the sequence of SEQ ID NO: 23, with 0 to 2 nucleic acid substitutions. In some cases, an antisense oligomer provided herein comprises the sequence of SEQ ID NO: 23, with 0 to 1 nucleic acid substitution.

[0330] In some cases, an antisense oligomer provided herein comprises the sequence of SEQ ID NO: 24, with 0 to 4 nucleic acid substitutions. In some cases, an antisense oligomer provided herein comprises the sequence of SEQ ID NO: 24, with 0 to 3 nucleic acid substitutions. In some cases, an antisense oligomer provided herein comprises the sequence of SEQ ID NO: 24, with 0 to 2 nucleic acid substitutions. In some cases, an antisense oligomer provided herein comprises the sequence of SEQ ID NO: 24, with 0 to 1 nucleic acid substitution.

[0331] In some cases, an antisense oligomer provided herein comprises the sequence of SEQ ID NO: 25, with 0 to 4 nucleic acid substitutions. In some cases, an antisense oligomer provided herein comprises the sequence of SEQ ID NO: 25, with 0 to 3 nucleic acid substitutions. In some cases, an antisense oligomer provided herein comprises the sequence of SEQ ID NO: 25, with 0 to 2 nucleic acid substitutions. In some cases, an antisense oligomer provided herein comprises the sequence of SEQ ID NO: 25, with 0 to 1 nucleic acid substitution.

[0332] In some cases, an antisense oligomer provided herein comprises the sequence of SEQ ID NO: 26, with 0 to 4 nucleic acid substitutions. In some cases, an antisense oligomer provided herein comprises the sequence of SEQ ID NO: 26, with 0 to 3 nucleic acid substitutions. In some cases, an antisense oligomer provided herein comprises the sequence of SEQ ID NO: 26, with 0 to 2 nucleic acid substitutions. In some cases, an antisense oligomer provided herein comprises the sequence of SEQ ID NO: 26, with 0 to 1 nucleic acid substitution.

[0333] In some cases, an antisense oligomer provided herein comprises the sequence of SEQ ID NO: 27, with 0 to 4 nucleic acid substitutions. In some cases, an antisense oligomer provided herein comprises the sequence of SEQ ID NO: 27, with 0 to 3 nucleic acid substitutions. In some cases, an antisense oligomer provided herein comprises the sequence of SEQ ID NO: 27, with 0 to 2 nucleic acid substitutions. In some cases, an antisense oligomer provided herein comprises the sequence of SEQ ID NO: 27, with 0 to 1 nucleic acid substitution.

[0334] In some cases, an antisense oligomer provided herein comprises the sequence of SEQ ID NO: 28, with 0 to 4 nucleic acid substitutions. In some cases, an antisense oligomer provided herein comprises the sequence of SEQ ID NO: 28, with 0 to 3 nucleic acid substitutions. In some cases, an antisense oligomer provided herein comprises the sequence of SEQ ID NO: 28, with 0 to 2 nucleic acid substitutions. In some cases, an antisense oligomer provided herein comprises the sequence of SEQ ID NO: 28, with 0 to 1 nucleic acid substitution.

[0335] In some cases, an antisense oligomer provided herein comprises the sequence of SEQ ID NO: 29, with 0 to 4 nucleic acid substitutions. In some cases, an antisense oligomer provided herein comprises the sequence of SEQ ID NO: 29, with 0 to 3 nucleic acid substitutions. In some cases, an antisense oligomer provided herein comprises the sequence of SEQ ID NO: 29, with 0 to 2 nucleic acid substitutions. In some cases, an antisense oligomer provided herein comprises the sequence of SEQ ID NO: 29, with 0 to 1 nucleic acid substitution.

[0336] In some cases, an antisense oligomer provided herein comprises the sequence of SEQ ID NO: 30, with 0 to 4 nucleic acid substitutions. In some cases, an antisense oligomer provided herein comprises the sequence of SEQ ID NO: 30, with 0 to 3 nucleic acid substitutions. In some cases, an antisense oligomer provided herein comprises the sequence of SEQ ID NO: 30, with 0 to 2 nucleic acid substitutions. In some cases, an antisense oligomer provided herein comprises the sequence of SEQ ID NO: 30, with 0 to 1 nucleic acid substitution.

[0337] In some cases, an antisense oligomer provided herein comprises the sequence of SEQ ID NO: 31, with 0 to 4 nucleic acid substitutions. In some cases, an antisense oligomer provided herein comprises the sequence of SEQ ID NO: 31, with 0 to 3 nucleic acid substitutions. In some cases, an antisense oligomer provided herein comprises the sequence of SEQ ID NO: 31, with 0 to 2 nucleic acid substitutions. In some cases, an antisense oligomer provided herein comprises the sequence of SEQ ID NO: 31, with 0 to 1 nucleic acid substitution.

[0338] In some cases, an antisense oligomer provided herein comprises the sequence of SEQ ID NO: 32, with 0 to 4 nucleic acid substitutions. In some cases, an antisense oligomer provided herein comprises the sequence of SEQ ID NO: 32, with 0 to 3 nucleic acid substitutions. In some cases, an antisense oligomer provided herein comprises the sequence of SEQ ID NO: 32, with 0 to 2 nucleic acid substitutions. In some cases, an antisense oligomer provided herein comprises the sequence of SEQ ID NO: 32, with 0 to 1 nucleic acid substitution.

[0339] In some cases, an antisense oligomer provided herein comprises the sequence of SEQ ID NO: 33, with 0 to 4 nucleic acid substitutions. In some cases, an antisense oligomer provided herein comprises the sequence of SEQ ID NO: 33, with 0 to 3 nucleic acid substitutions. In some cases, an antisense oligomer provided herein comprises the sequence of SEQ ID NO: 33, with 0 to 2 nucleic acid substitutions. In some cases, an antisense oligomer provided herein comprises the sequence of SEQ ID NO: 33, with 0 to 1 nucleic acid substitution.

[0340] In some cases, an antisense oligomer provided herein comprises the sequence of SEQ ID NO: 34, with 0 to 4 nucleic acid substitutions. In some cases, an antisense oligomer provided herein comprises the sequence of SEQ ID NO: 34, with 0 to 3 nucleic acid substitutions. In some cases, an antisense oligomer provided herein comprises the sequence of SEQ ID NO: 34, with 0 to 2 nucleic acid substitutions. In some cases, an antisense oligomer provided herein comprises the sequence of SEQ ID NO: 34, with 0 to 1 nucleic acid substitution.

[0341] In some cases, an antisense oligomer provided herein comprises the sequence of SEQ ID NO: 35, with 0 to 4 nucleic acid substitutions. In some cases, an antisense oligomer provided herein comprises the sequence of SEQ ID NO: 35, with 0 to 3 nucleic acid substitutions. In some cases, an antisense oligomer provided herein comprises the sequence of SEQ ID NO: 35, with 0 to 2 nucleic acid substitutions. In some cases, an antisense oligomer provided herein comprises the sequence of SEQ ID NO: 35, with 0 to 1 nucleic acid substitution.

[0342] In some cases, an antisense oligomer provided herein comprises the sequence of SEQ ID NO: 36, with 0 to 4 nucleic acid substitutions. In some cases, an antisense oligomer provided herein comprises the sequence of SEQ ID NO: 36, with 0 to 3 nucleic acid substitutions. In some cases, an antisense oligomer provided herein comprises the sequence of SEQ ID NO: 36, with 0 to 2 nucleic acid substitutions. In some cases, an antisense oligomer provided herein comprises the sequence of SEQ ID NO: 36, with 0 to 1 nucleic acid substitution.

[0343] In some cases, an antisense oligomer provided herein comprises the sequence of SEQ ID NO: 37, with 0 to 4 nucleic acid substitutions. In some cases, an antisense oligomer provided herein comprises the sequence of SEQ ID NO: 37, with 0 to 3 nucleic acid substitutions. In some cases, an antisense oligomer provided herein comprises the sequence of SEQ ID NO: 37, with 0 to 2 nucleic acid substitutions. In some cases, an antisense oligomer provided herein comprises the sequence of SEQ ID NO: 37, with 0 to 1 nucleic acid substitution.

[0344] In some cases, an antisense oligomer provided herein comprises the sequence of SEQ ID NO: 38, with 0 to 4 nucleic acid substitutions. In some cases, an antisense oligomer provided herein comprises the sequence of SEQ ID NO: 38, with 0 to 3 nucleic acid substitutions. In some cases, an antisense oligomer provided herein comprises the sequence of SEQ ID NO: 38, with 0 to 2 nucleic acid substitutions. In some cases, an antisense oligomer provided herein comprises the sequence of SEQ ID NO: 38, with 0 to 1 nucleic acid substitution.

[0345] In some cases, an antisense oligomer provided herein comprises the sequence of SEQ ID NO: 39, with 0 to 4 nucleic acid substitutions. In some cases, an antisense oligomer provided herein comprises the sequence of SEQ ID NO: 39, with 0 to 3 nucleic acid substitutions. In some cases, an antisense oligomer provided herein comprises the sequence of SEQ ID NO: 39, with 0 to 2 nucleic acid substitutions. In some cases, an antisense oligomer provided herein comprises the sequence of SEQ ID NO: 39, with 0 to 1 nucleic acid substitution.

[0346] In some cases, an antisense oligomer provided herein comprises the sequence of SEQ ID NO: 40, with 0 to 4 nucleic acid substitutions. In some cases, an antisense oligomer provided herein comprises the sequence of SEQ ID NO: 40, with 0 to 3 nucleic acid substitutions. In some cases, an antisense oligomer provided herein comprises the sequence of SEQ ID NO: 40, with 0 to 2 nucleic acid substitutions. In some cases, an antisense oligomer provided herein comprises the sequence of SEQ ID NO: 40, with 0 to 1 nucleic acid substitution.

[0347] In some cases, an antisense oligomer provided herein comprises the sequence of SEQ ID NO: 41, with 0 to 4 nucleic acid substitutions. In some cases, an antisense oligomer provided herein comprises the sequence of SEQ ID NO: 41, with 0 to 3 nucleic acid substitutions. In some cases, an antisense oligomer provided herein comprises the sequence of SEQ ID NO: 41, with 0 to 2 nucleic acid substitutions. In some cases, an antisense oligomer provided herein comprises the sequence of SEQ ID NO: 41, with 0 to 1 nucleic acid substitution.

[0348] In some cases, an antisense oligomer provided herein comprises the sequence of SEQ ID NO: 42, with 0 to 4 nucleic acid substitutions. In some cases, an antisense oligomer provided herein comprises the sequence of SEQ ID NO: 42, with 0 to 3 nucleic acid substitutions. In some cases, an antisense oligomer provided herein comprises the sequence of SEQ ID NO: 42, with 0 to 2 nucleic acid substitutions. In some cases, an antisense oligomer provided herein comprises the sequence of SEQ ID NO: 42, with 0 to 1 nucleic acid substitution.

[0349] In some cases, an antisense oligomer provided herein comprises the sequence of SEQ ID NO: 43, with 0 to 4 nucleic acid substitutions. In some cases, an antisense oligomer provided herein comprises the sequence of SEQ ID NO: 43, with 0 to 3 nucleic acid substitutions. In some cases, an antisense oligomer provided herein comprises the sequence of SEQ ID NO: 43, with 0 to 2 nucleic acid substitutions. In some cases, an antisense oligomer provided herein comprises the sequence of SEQ ID NO: 43, with 0 to 1 nucleic acid substitution.

[0350] In some cases, an antisense oligomer provided herein comprises the sequence of SEQ ID NO: 44, with 0 to 4 nucleic acid substitutions. In some cases, an antisense oligomer provided herein comprises the sequence of SEQ ID NO: 44, with 0 to 3 nucleic acid substitutions. In some cases, an antisense oligomer provided herein comprises the sequence of SEQ ID NO: 44, with 0 to 2 nucleic acid substitutions. In some cases, an antisense oligomer provided herein comprises the sequence of SEQ ID NO: 44, with 0 to 1 nucleic acid substitution.

[0351] In some cases, an antisense oligomer provided herein comprises the sequence of SEQ ID NO: 45, with 0 to 4 nucleic acid substitutions. In some cases, an antisense oligomer provided herein comprises the sequence of SEQ ID NO: 45, with 0 to 3 nucleic acid substitutions. In some cases, an antisense oligomer provided herein comprises the sequence of SEQ ID NO: 45, with 0 to 2 nucleic acid substitutions. In some cases, an antisense oligomer provided herein comprises the sequence of SEQ ID NO: 45, with 0 to 1 nucleic acid substitution.

[0352] In some cases, an antisense oligomer provided herein comprises the sequence of SEQ ID NO: 46, with 0 to 4 nucleic acid substitutions. In some cases, an antisense oligomer provided herein comprises the sequence of SEQ ID NO: 46, with 0 to 3 nucleic acid substitutions. In some cases, an antisense oligomer provided herein comprises the sequence of SEQ ID NO: 46, with 0 to 2 nucleic acid substitutions. In some cases, an antisense oligomer provided herein comprises the sequence of SEQ ID NO: 46, with 0 to 1 nucleic acid substitution.

[0353] In some cases, an antisense oligomer provided herein comprises the sequence of SEQ ID NO: 47, with 0 to 4 nucleic acid substitutions. In some cases, an antisense oligomer provided herein comprises the sequence of SEQ ID NO: 47, with 0 to 3 nucleic acid substitutions. In some cases, an antisense oligomer provided herein comprises the sequence of SEQ ID NO: 47, with 0 to 2 nucleic acid substitutions. In some cases, an antisense oligomer provided herein comprises the sequence of SEQ ID NO: 47, with 0 to 1 nucleic acid substitution.

[0354] In some cases, an antisense oligomer provided herein comprises the sequence of SEQ ID NO: 48, with 0 to 4 nucleic acid substitutions. In some cases, an antisense oligomer provided herein comprises the sequence of SEQ ID NO: 48, with 0 to 3 nucleic acid substitutions. In some cases, an antisense oligomer provided herein comprises the sequence of SEQ ID NO: 48, with 0 to 2 nucleic acid substitutions. In some cases, an antisense oligomer provided herein comprises the sequence of SEQ ID NO: 48, with 0 to 1 nucleic acid substitution.

[0355] In some cases, an antisense oligomer provided herein comprises the sequence of SEQ ID NO: 49, with 0 to 4 nucleic acid substitutions. In some cases, an antisense oligomer provided herein comprises the sequence of SEQ ID NO: 49, with 0 to 3 nucleic acid substitutions. In some cases, an antisense oligomer provided herein comprises the sequence of SEQ ID NO: 49, with 0 to 2 nucleic acid substitutions. In some cases, an antisense oligomer provided herein comprises the sequence of SEQ ID NO: 49, with 0 to 1 nucleic acid substitution.

[0356] In some cases, an antisense oligomer provided herein comprises the sequence of SEQ ID NO: 50, with 0 to 4 nucleic acid substitutions. In some cases, an antisense oligomer provided herein comprises the sequence of SEQ ID NO: 50, with 0 to 3 nucleic acid substitutions. In some cases, an antisense oligomer provided herein comprises the sequence of SEQ ID NO: 50, with 0 to 2 nucleic acid substitutions. In some cases, an antisense oligomer provided herein comprises the sequence of SEQ ID NO: 50, with 0 to 1 nucleic acid substitution.

[0357] In some cases, an antisense oligomer provided herein comprises the sequence of SEQ ID NO: 51, with 0 to 4 nucleic acid substitutions. In some cases, an antisense oligomer provided herein comprises the sequence of SEQ ID NO: 51, with 0 to 3 nucleic acid substitutions. In some cases, an antisense oligomer provided herein comprises the sequence of SEQ ID NO: 51, with 0 to 2 nucleic acid substitutions. In some cases, an antisense oligomer provided herein comprises the sequence of SEQ ID NO: 51, with 0 to 1 nucleic acid substitution.

[0358] In some cases, an antisense oligomer provided herein comprises the sequence of SEQ ID NO: 52, with 0 to 4 nucleic acid substitutions. In some cases, an antisense oligomer provided herein comprises the sequence of SEQ ID NO: 52, with 0 to 3 nucleic acid substitutions. In some cases, an antisense oligomer provided herein comprises the sequence of SEQ ID NO: 52, with 0 to 2 nucleic acid substitutions. In some cases, an antisense oligomer provided herein comprises the sequence of SEQ ID NO: 52, with 0 to 1 nucleic acid substitution.

[0359] In some cases, an antisense oligomer provided herein comprises the sequence of SEQ ID NO: 53, with 0 to 4 nucleic acid substitutions. In some cases, an antisense oligomer provided herein comprises the sequence of SEQ ID NO: 53, with 0 to 3 nucleic acid substitutions. In some cases, an antisense oligomer provided herein comprises the sequence of SEQ ID NO: 53, with 0 to 2 nucleic acid substitutions. In some cases, an antisense oligomer provided herein comprises the sequence of SEQ ID NO: 53, with 0 to 1 nucleic acid substitution.

[0360] In some cases, an antisense oligomer provided herein comprises the sequence of SEQ ID NO: 54, with 0 to 4 nucleic acid substitutions. In some cases, an antisense oligomer provided herein comprises the sequence of SEQ ID NO: 54, with 0 to 3 nucleic acid substitutions. In some cases, an antisense oligomer provided herein comprises the sequence of SEQ ID NO: 54, with 0 to 2 nucleic acid substitutions. In some cases, an antisense oligomer provided herein comprises the sequence of SEQ ID NO: 54, with 0 to 1 nucleic acid substitution.

[0361] In some cases, an antisense oligomer provided herein comprises the sequence of SEQ ID NO: 55, with 0 to 4 nucleic acid substitutions. In some cases, an antisense oligomer provided herein comprises the sequence of SEQ ID NO: 55, with 0 to 3 nucleic acid substitutions. In some cases, an antisense oligomer provided herein comprises the sequence of SEQ ID NO: 55, with 0 to 2 nucleic acid substitutions. In some cases, an antisense oligomer provided herein comprises the sequence of SEQ ID NO: 55, with 0 to 1 nucleic acid substitution.

[0362] In some cases, an antisense oligomer provided herein comprises the sequence of SEQ ID NO: 56, with 0 to 4 nucleic acid substitutions. In some cases, an antisense oligomer provided herein comprises the sequence of SEQ ID NO: 56, with 0 to 3 nucleic acid substitutions. In some cases, an antisense oligomer provided herein comprises the sequence of SEQ ID NO: 56, with 0 to 2 nucleic acid substitutions. In some cases, an antisense oligomer provided herein comprises the sequence of SEQ ID NO: 56, with 0 to 1 nucleic acid substitution.

[0363] In some cases, an antisense oligomer provided herein comprises the sequence of SEQ ID NO: 57, with 0 to 4 nucleic acid substitutions. In some cases, an antisense oligomer provided herein comprises the sequence of SEQ ID NO: 57, with 0 to 3 nucleic acid substitutions. In some cases, an antisense oligomer provided herein comprises the sequence of SEQ ID NO: 57, with 0 to 2 nucleic acid substitutions. In some cases, an antisense oligomer provided herein comprises the sequence of SEQ ID NO: 57, with 0 to 1 nucleic acid substitution.

[0364] In some cases, an antisense oligomer provided herein comprises the sequence of SEQ ID NO: 58, with 0 to 4 nucleic acid substitutions. In some cases, an antisense oligomer provided herein comprises the sequence of SEQ ID NO: 58, with 0 to 3 nucleic acid substitutions. In some cases, an antisense oligomer provided herein comprises the sequence of SEQ ID NO: 58, with 0 to 2 nucleic acid substitutions. In some cases, an antisense oligomer provided herein comprises the sequence of SEQ ID NO: 58, with 0 to 1 nucleic acid substitution.

[0365] In some cases, an antisense oligomer provided herein comprises the sequence of SEQ ID NO: 59, with 0 to 4 nucleic acid substitutions. In some cases, an antisense oligomer provided herein comprises the sequence of SEQ ID NO: 59, with 0 to 3 nucleic acid substitutions. In some cases, an antisense oligomer provided herein comprises the sequence of SEQ ID NO: 59, with 0 to 2 nucleic acid substitutions. In some cases, an antisense oligomer provided herein comprises the sequence of SEQ ID NO: 59, with 0 to 1 nucleic acid substitution.

[0366] In some cases, an antisense oligomer provided herein comprises the sequence of SEQ ID NO: 60, with 0 to 4 nucleic acid substitutions. In some cases, an antisense oligomer provided herein comprises the sequence of SEQ ID NO: 60, with 0 to 3 nucleic acid substitutions. In some cases, an antisense oligomer provided herein comprises the sequence of SEQ ID NO: 60, with 0 to 2 nucleic acid substitutions. In some cases, an antisense oligomer provided herein comprises the sequence of SEQ ID NO: 60, with 0 to 1 nucleic acid substitution.

[0367] In some cases, an antisense oligomer provided herein comprises the sequence of SEQ ID NO: 61, with 0 to 4 nucleic acid substitutions. In some cases, an antisense oligomer provided herein comprises the sequence of SEQ ID NO: 61, with 0 to 3 nucleic acid substitutions. In some cases, an antisense oligomer provided herein comprises the sequence of SEQ ID NO: 61, with 0 to 2 nucleic acid substitutions. In some cases, an antisense oligomer provided herein comprises the sequence of SEQ ID NO: 61, with 0 to 1 nucleic acid substitution.

[0368] In some cases, an antisense oligomer provided herein comprises the sequence of SEQ ID NO: 62, with 0 to 4 nucleic acid substitutions. In some cases, an antisense oligomer provided herein comprises the sequence of SEQ ID NO: 62, with 0 to 3 nucleic acid substitutions. In some cases, an antisense oligomer provided herein comprises the sequence of SEQ ID NO: 62, with 0 to 2 nucleic acid substitutions. In some cases, an antisense oligomer provided herein comprises the sequence of SEQ ID NO: 62, with 0 to 1 nucleic acid substitution.

[0369] In some cases, an antisense oligomer provided herein comprises the sequence of SEQ ID NO: 63, with 0 to 4 nucleic acid substitutions. In some cases, an antisense oligomer provided herein comprises the sequence of SEQ ID NO: 63, with 0 to 3 nucleic acid substitutions. In some cases, an antisense oligomer provided herein comprises the sequence of SEQ ID NO: 63, with 0 to 2 nucleic acid substitutions. In some cases, an antisense oligomer provided herein comprises the sequence of SEQ ID NO: 63, with 0 to 1 nucleic acid substitution.

[0370] In some cases, an antisense oligomer provided herein comprises the sequence of SEQ ID NO: 64, with 0 to 4 nucleic acid substitutions. In some cases, an antisense oligomer provided herein comprises the sequence of SEQ ID NO: 64, with 0 to 3 nucleic acid substitutions. In some cases, an antisense oligomer provided herein comprises the sequence of SEQ ID NO: 64, with 0 to 2 nucleic acid substitutions. In some cases, an antisense oligomer provided herein comprises the sequence of SEQ ID NO: 64, with 0 to 1 nucleic acid substitution.

[0371] In some cases, an antisense oligomer provided herein comprises the sequence of SEQ ID NO: 65, with 0 to 4 nucleic acid substitutions. In some cases, an antisense oligomer provided herein comprises the sequence of SEQ ID NO: 65, with 0 to 3 nucleic acid substitutions. In some cases, an antisense oligomer provided herein comprises the sequence of SEQ ID NO: 65, with 0 to 2 nucleic acid substitutions. In some cases, an antisense oligomer provided herein comprises the sequence of SEQ ID NO: 65, with 0 to 1 nucleic acid substitution.

[0372] In some cases, an antisense oligomer provided herein comprises the sequence of SEQ ID NO: 66, with 0 to 4 nucleic acid substitutions. In some cases, an antisense oligomer provided herein comprises the sequence of SEQ ID NO: 66, with 0 to 3 nucleic acid substitutions. In some cases, an antisense oligomer provided herein comprises the sequence of SEQ ID NO: 66, with 0 to 2 nucleic acid substitutions. In some cases, an antisense oligomer provided herein comprises the sequence of SEQ ID NO: 66, with 0 to 1 nucleic acid substitution.

[0373] In some cases, an antisense oligomer provided herein comprises the sequence of SEQ ID NO: 67, with 0 to 4 nucleic acid substitutions. In some cases, an antisense oligomer provided herein comprises the sequence of SEQ ID NO: 67, with 0 to 3 nucleic acid substitutions. In some cases, an antisense oligomer provided herein comprises the sequence of SEQ ID NO: 67, with 0 to 2 nucleic acid substitutions. In some cases, an antisense oligomer provided herein comprises the sequence of SEQ ID NO: 67, with 0 to 1 nucleic acid substitution.

[0374] In some cases, an antisense oligomer provided herein comprises the sequence of SEQ ID NO: 68, with 0 to 4 nucleic acid substitutions. In some cases, an antisense oligomer provided herein comprises the sequence of SEQ ID NO: 68, with 0 to 3 nucleic acid substitutions. In some cases, an antisense oligomer provided herein comprises the sequence of SEQ ID NO: 68, with 0 to 2 nucleic acid substitutions. In some cases, an antisense oligomer provided herein comprises the sequence of SEQ ID NO: 68, with 0 to 1 nucleic acid substitution.

[0375] In some cases, an antisense oligomer provided herein comprises the sequence of SEQ ID NO: 69, with 0 to 4 nucleic acid substitutions. In some cases, an antisense oligomer provided herein comprises the sequence of SEQ ID NO: 69, with 0 to 3 nucleic acid substitutions. In some cases, an antisense oligomer provided herein comprises the sequence of SEQ ID NO: 69, with 0 to 2 nucleic acid substitutions. In some cases, an antisense oligomer provided herein comprises the sequence of SEQ ID NO: 69, with 0 to 1 nucleic acid substitution.

[0376] In some cases, an antisense oligomer provided herein comprises the sequence of SEQ ID NO: 70, with 0 to 4 nucleic acid substitutions. In some cases, an antisense oligomer provided herein comprises the sequence of SEQ ID NO: 70, with 0 to 3 nucleic acid substitutions. In some cases, an antisense oligomer provided herein comprises the sequence of SEQ ID NO: 70, with 0 to 2 nucleic acid substitutions. In some cases, an antisense oligomer provided herein comprises the sequence of SEQ ID NO: 70, with 0 to 1 nucleic acid substitution.

[0377] In some cases, an antisense oligomer provided herein comprises the sequence of SEQ ID NO: 71, with 0 to 4 nucleic acid substitutions. In some cases, an antisense oligomer provided herein comprises the sequence of SEQ ID NO: 71, with 0 to 3 nucleic acid substitutions. In some cases, an antisense oligomer provided herein comprises the sequence of SEQ ID NO: 71, with 0 to 2 nucleic acid substitutions. In some cases, an antisense oligomer provided herein comprises the sequence of SEQ ID NO: 71, with 0 to 1 nucleic acid substitution.

[0378] In some cases, an antisense oligomer provided herein comprises the sequence of SEQ ID NO: 72, with 0 to 4 nucleic acid substitutions. In some cases, an antisense oligomer provided herein comprises the sequence of SEQ ID NO: 72, with 0 to 3 nucleic acid substitutions. In some cases, an antisense oligomer provided herein comprises the sequence of SEQ ID NO: 72, with 0 to 2 nucleic acid substitutions. In some cases, an antisense oligomer provided herein comprises the sequence of SEQ ID NO: 72, with 0 to 1 nucleic acid substitution.

[0379] In some cases, an antisense oligomer provided herein comprises the sequence of SEQ ID NO: 73, with 0 to 4 nucleic acid substitutions. In some cases, an antisense oligomer provided herein comprises the sequence of SEQ ID NO: 73, with 0 to 3 nucleic acid substitutions. In some cases, an antisense oligomer provided herein comprises the sequence of SEQ ID NO: 73, with 0 to 2 nucleic acid substitutions. In some cases, an antisense oligomer provided herein comprises the sequence of SEQ ID NO: 73, with 0 to 1 nucleic acid substitution.

[0380] In some cases, an antisense oligomer provided herein comprises the sequence of SEQ ID NO: 74, with 0 to 4 nucleic acid substitutions. In some cases, an antisense oligomer provided herein comprises the sequence of SEQ ID NO: 74, with 0 to 3 nucleic acid substitutions. In some cases, an antisense oligomer provided herein comprises the sequence of SEQ ID NO: 74, with 0 to 2 nucleic acid substitutions. In some cases, an antisense oligomer provided herein comprises the sequence of SEQ ID NO: 74, with 0 to 1 nucleic acid substitution.

[0381] In some cases, an antisense oligomer provided herein comprises the sequence of SEQ ID NO: 75, with 0 to 4 nucleic acid substitutions. In some cases, an antisense oligomer provided herein comprises the sequence of SEQ ID NO: 75, with 0 to 3 nucleic acid substitutions. In some cases, an antisense oligomer provided herein comprises the sequence of SEQ ID NO: 75, with 0 to 2 nucleic acid substitutions. In some cases, an antisense oligomer provided herein comprises the sequence of SEQ ID NO: 75, with 0 to 1 nucleic acid substitution.

[0382] In some cases, an antisense oligomer provided herein comprises the sequence of SEQ ID NO: 76, with 0 to 4 nucleic acid substitutions. In some cases, an antisense oligomer provided herein comprises the sequence of SEQ ID NO: 76, with 0 to 3 nucleic acid substitutions. In some cases, an antisense oligomer provided herein comprises the sequence of SEQ ID NO: 76, with 0 to 2 nucleic acid substitutions. In some cases, an antisense oligomer provided herein comprises the sequence of SEQ ID NO: 76, with 0 to 1 nucleic acid substitution.

[0383] In some cases, an antisense oligomer provided herein comprises the sequence of SEQ ID NO: 77, with 0 to 4 nucleic acid substitutions. In some cases, an antisense oligomer provided herein comprises the sequence of SEQ ID NO: 77, with 0 to 3 nucleic acid substitutions. In some cases, an antisense oligomer provided herein comprises the sequence of SEQ ID NO: 77, with 0 to 2 nucleic acid substitutions. In some cases, an antisense oligomer provided herein comprises the sequence of SEQ ID NO: 77, with 0 to 1 nucleic acid substitution.

[0384] In some cases, an antisense oligomer provided herein comprises the sequence of SEQ ID NO: 78, with 0 to 4 nucleic acid substitutions. In some cases, an antisense oligomer provided herein comprises the sequence of SEQ ID NO: 78, with 0 to 3 nucleic acid substitutions. In some cases, an antisense oligomer provided herein comprises the sequence of SEQ ID NO: 78, with 0 to 2 nucleic acid substitutions. In some cases, an antisense oligomer provided herein comprises the sequence of SEQ ID NO: 78, with 0 to 1 nucleic acid substitution.

[0385] In some cases, an antisense oligomer provided herein comprises the sequence of SEQ ID NO: 79, with 0 to 4 nucleic acid substitutions. In some cases, an antisense oligomer provided herein comprises the sequence of SEQ ID NO: 79, with 0 to 3 nucleic acid substitutions. In some cases, an antisense oligomer provided herein comprises the sequence of SEQ ID NO: 79, with 0 to 2 nucleic acid substitutions. In some cases, an antisense oligomer provided herein comprises the sequence of SEQ ID NO: 79, with 0 to 1 nucleic acid substitution.

[0386] In some cases, an antisense oligomer provided herein comprises the sequence of SEQ ID NO: 80, with 0 to 4 nucleic acid substitutions. In some cases, an antisense oligomer provided herein comprises the sequence of SEQ ID NO: 80, with 0 to 3 nucleic acid substitutions. In some cases, an antisense oligomer provided herein comprises the sequence of SEQ ID NO: 80, with 0 to 2 nucleic acid substitutions. In some cases, an antisense oligomer provided herein comprises the sequence of SEQ ID NO: 80, with 0 to 1 nucleic acid substitution.

[0387] In some cases, an antisense oligomer provided herein comprises the sequence of SEQ ID NO: 81, with 0 to 4 nucleic acid substitutions. In some cases, an antisense oligomer provided herein comprises the sequence of SEQ ID NO: 81, with 0 to 3 nucleic acid substitutions. In some cases, an antisense oligomer provided herein comprises the sequence of SEQ ID NO: 81, with 0 to 2 nucleic acid substitutions. In some cases, an antisense oligomer provided herein comprises the sequence of SEQ ID NO: 81, with 0 to 1 nucleic acid substitution.

[0388] In some cases, an antisense oligomer provided herein comprises the sequence of SEQ ID NO: 82, with 0 to 4 nucleic acid substitutions. In some cases, an antisense oligomer provided herein comprises the sequence of SEQ ID NO: 82, with 0 to 3 nucleic acid substitutions. In some cases, an antisense oligomer provided herein comprises the sequence of SEQ ID NO: 82, with 0 to 2 nucleic acid substitutions. In some cases, an antisense oligomer provided herein comprises the sequence of SEQ ID NO: 82, with 0 to 1 nucleic acid substitution.

[0389] In some cases, an antisense oligomer provided herein comprises the sequence of SEQ ID NO: 83, with 0 to 4 nucleic acid substitutions. In some cases, an antisense oligomer provided herein comprises the sequence of SEQ ID NO: 83, with 0 to 3 nucleic acid substitutions. In some cases, an antisense oligomer provided herein comprises the sequence of SEQ ID NO: 83, with 0 to 2 nucleic acid substitutions. In some cases, an antisense oligomer provided herein comprises the sequence of SEQ ID NO: 83, with 0 to 1 nucleic acid substitution.

[0390] In some cases, an antisense oligomer provided herein comprises the sequence of SEQ ID NO: 84, with 0 to 4 nucleic acid substitutions. In some cases, an antisense oligomer provided herein comprises the sequence of SEQ ID NO: 84, with 0 to 3 nucleic acid substitutions. In some cases, an antisense oligomer provided herein comprises the sequence of SEQ ID NO: 84, with 0 to 2 nucleic acid substitutions. In some cases, an antisense oligomer provided herein comprises the sequence of SEQ ID NO: 84, with 0 to 1 nucleic acid substitution.

[0391] In some cases, an antisense oligomer provided herein comprises the sequence of SEQ ID NO: 85, with 0 to 4 nucleic acid substitutions. In some cases, an antisense oligomer provided herein comprises the sequence of SEQ ID NO: 85, with 0 to 3 nucleic acid substitutions. In some cases, an antisense oligomer provided herein comprises the sequence of SEQ ID NO: 85, with 0 to 2 nucleic acid substitutions. In some cases, an antisense oligomer provided herein comprises the sequence of SEQ ID NO: 85, with 0 to 1 nucleic acid substitution.

[0392] In some cases, an antisense oligomer provided herein comprises the sequence of SEQ ID NO: 86, with 0 to 4 nucleic acid substitutions. In some cases, an antisense oligomer provided herein comprises the sequence of SEQ ID NO: 86, with 0 to 3 nucleic acid substitutions. In some cases, an antisense oligomer provided herein comprises the sequence of SEQ ID NO: 86, with 0 to 2 nucleic acid substitutions. In some cases, an antisense oligomer provided herein comprises the sequence of SEQ ID NO: 86, with 0 to 1 nucleic acid substitution.

[0393] In some cases, an antisense oligomer provided herein comprises the sequence of SEQ ID NO: 87, with 0 to 4 nucleic acid substitutions. In some cases, an antisense oligomer provided herein comprises the sequence of SEQ ID NO: 87, with 0 to 3 nucleic acid substitutions. In some cases, an antisense oligomer provided herein comprises the sequence of SEQ ID NO: 87, with 0 to 2 nucleic acid substitutions. In some cases, an antisense oligomer provided herein comprises the sequence of SEQ ID NO: 87, with 0 to 1 nucleic acid substitution.

[0394] In some cases, an antisense oligomer provided herein comprises the sequence of SEQ ID NO: 88, with 0 to 4 nucleic acid substitutions. In some cases, an antisense oligomer provided herein comprises the sequence of SEQ ID NO: 88, with 0 to 3 nucleic acid substitutions. In some cases, an antisense oligomer provided herein comprises the sequence of SEQ ID NO: 88, with 0 to 2 nucleic acid substitutions. In some cases, an antisense oligomer provided herein comprises the sequence of SEQ ID NO: 88, with 0 to 1 nucleic acid substitution.

[0395] In some cases, an antisense oligomer provided herein comprises the sequence of SEQ ID NO: 89, with 0 to 4 nucleic acid substitutions. In some cases, an antisense oligomer provided herein comprises the sequence of SEQ ID NO: 89, with 0 to 3 nucleic acid substitutions. In some cases, an antisense oligomer provided herein comprises the sequence of SEQ ID NO: 89, with 0 to 2 nucleic acid substitutions. In some cases, an antisense oligomer provided herein comprises the sequence of SEQ ID NO: 89, with 0 to 1 nucleic acid substitution.

[0396] In some cases, an antisense oligomer provided herein comprises the sequence of SEQ ID NO: 90, with 0 to 4 nucleic acid substitutions. In some cases, an antisense oligomer provided herein comprises the sequence of SEQ ID NO: 90, with 0 to 3 nucleic acid substitutions. In some cases, an antisense oligomer provided herein comprises the sequence of SEQ ID NO: 90, with 0 to 2 nucleic acid substitutions. In some cases, an antisense oligomer provided herein comprises the sequence of SEQ ID NO: 90, with 0 to 1 nucleic acid substitution.

[0397] In some cases, an antisense oligomer provided herein comprises the sequence of SEQ ID NO: 91, with 0 to 4 nucleic acid substitutions. In some cases, an antisense oligomer provided herein comprises the sequence of SEQ ID NO: 91, with 0 to 3 nucleic acid substitutions. In some cases, an antisense oligomer provided herein comprises the sequence of SEQ ID NO: 91, with 0 to 2 nucleic acid substitutions. In some cases, an antisense oligomer provided herein comprises the sequence of SEQ ID NO: 91, with 0 to 1 nucleic acid substitution.

[0398] In some cases, an antisense oligomer provided herein comprises the sequence of SEQ ID NO: 92, with 0 to 4 nucleic acid substitutions. In some cases, an antisense oligomer provided herein comprises the sequence of SEQ ID NO: 92, with 0 to 3 nucleic acid substitutions. In some cases, an antisense oligomer provided herein comprises the sequence of SEQ ID NO: 92, with 0 to 2 nucleic acid substitutions. In some cases, an antisense oligomer provided herein comprises the sequence of SEQ ID NO: 92, with 0 to 1 nucleic acid substitution.

[0399] In certain embodiments, an antisense oligomer targeted to a target nucleic acid is 12 to 30 subunits in length. In certain embodiments, an antisense oligomer targeted to a target nucleic acid is 12 to 25 subunits in length. In certain embodiments, an antisense oligomer targeted to a target nucleic acid is 12 to 22 subunits in length. In certain embodiments, an antisense oligomer targeted to a target nucleic acid is 14 to 20 subunits in length. In certain embodiments, an antisense oligomer targeted to a target nucleic acid is 15 to 25 subunits in length. In certain embodiments, an antisense oligomer targeted to a target nucleic acid is 18 to 22 subunits in length. In certain embodiments, an antisense oligomer targeted to a target nucleic acid is 19 to 21 subunits in length. In certain embodiments, the antisense oligomer is 8 to 80, 12 to 50, 13 to 30, 13 to 50, 14 to 30, 14 to 50, 15 to 30, 15 to 50, 16 to 30, 16 to 50, 17 to 30, 17 to 50, 18 to 30, 18 to 50, 19 to 30, 19 to 50, or 20 to 30 linked subunits in length.

[0400] In certain embodiments, an antisense oligomer targeted to a target nucleic acid is 12 subunits in length. In certain embodiments, an antisense oligomer targeted to a target nucleic acid is 13 subunits in length. In certain embodiments, an antisense oligomer targeted to a target nucleic acid is 14 subunits in length. In certain embodiments, an antisense oligomer targeted to a target nucleic acid is 15 subunits in length. In certain embodiments, an antisense oligomer targeted to a target nucleic acid is 16 subunits in length. In certain embodiments, an antisense oligomer targeted to a target nucleic acid is 17 subunits in length. In certain embodiments, an antisense oligomer targeted to a target nucleic acid is 18 subunits in length. In certain embodiments, an antisense oligomer targeted to a target nucleic acid is 19 subunits in length. In certain embodiments, an antisense oligomer targeted to a target nucleic acid is 20 subunits in length. In certain embodiments, an antisense oligomer targeted to a target nucleic acid is 21 subunits in length. In certain embodiments, an antisense oligomer targeted to a target nucleic acid is 22 subunits in length. In certain embodiments, an antisense oligomer targeted to a target nucleic acid is 23 subunits in length. In certain embodiments, an antisense oligomer targeted to a target nucleic acid is 24 subunits in length. In certain embodiments, an antisense oligomer targeted to a target nucleic acid is 25 subunits in length. In certain embodiments, an antisense oligomer targeted to a target nucleic acid is 26 subunits in length. In certain embodiments, an antisense oligomer targeted to a target nucleic acid is 27 subunits in length. In certain embodiments, an antisense oligomer targeted to a target nucleic acid is 28 subunits in length. In certain embodiments, an antisense oligomer targeted to a target nucleic acid is 29 subunits in length. In certain embodiments, an antisense oligomer targeted to a target nucleic acid is 30 subunits in length. In certain embodiments, the antisense oligomer targeted to a target nucleic acid is 31, 32, 33, 34, 35, 36, 37, 38, 39, 40, 41, 42, 43, 44, 45, 46, 47, 48, 49, 50, 51, 52, 53, 54, 55, 56, 57, 58, 59, 60, 61, 62, 63, 64, 65, 66, 67, 68, 69, 70, 71, 72, 73, 74, 75, 76, 77, 78, 79, or 80 linked subunits in length, or a range defined by any two of the above values. In certain embodiments the antisense oligomer is an antisense oligonucleotide, and the linked subunits are nucleosides.

[0401] Antisense oligomers provided herein can have nucleotides that mismatch the target sequence. For instance, an antisense oligonucleotide of 25 nucleobases in length can have 8 or 11 mismatch bases near the ends of the antisense oligonucleotides, while still being able to direct specific cleavage of the target mRNA, albeit to a lesser extent than the antisense oligonucleotides that contained no mismatches. In some cases, the antisense oligonucleotide provided herein has 12 to 30 subunits in length (e.g., nucleobases), including those with 1 or 3 mismatches.

### Chemically Modified Antisense Oligomer

[0402] In certain embodiments, antisense oligomers provided herein have chemically modified subunits arranged in patterns, or motifs, to confer to the antisense oligomers properties such as enhanced inhibitory activity, increased binding affinity for a target nucleic acid, or resistance to degradation by in vivo nucleases.

[0403] In some cases, provided herein are chimeric antisense oligomers. For instance, chimeric antisense oligomers can contain at least one region modified so as to confer increased resistance to nuclease degradation, increased cellular uptake, increased binding affinity for the target nucleic acid, and/or increased inhibitory activity. A second region of a chimeric antisense oligomer can optionally serve as a substrate for the cellular endonuclease RNase H, which cleaves the RNA strand of an RNA:DNA duplex.

[0404] In some cases, the antisense oligomers provided herein have a gapmer motif. Antisense oligomers having a gapmer motif can be considered chimeric antisense oligomers. In a gapmer, an internal region having a plurality of nucleotides that supports RNaseH cleavage can be positioned between external regions having a plurality of nucleotides that are chemically distinct from the nucleosides of the internal region. In the case of an antisense oligonucleotide having a gapmer motif, the gap segment can serve as the substrate for endonuclease cleavage, while the wing segments comprise modified nucleosides. In certain embodiments, the regions of a gapmer are differentiated by the types of sugar moieties comprising each distinct region. The types of sugar moieties that are used to differentiate the regions of a gapmer can include β-D-ribonucleosides, β-D-deoxyribonucleosides, 2′-modified nucleosides (such 2′-modified nucleosides may include 2′-MOE, and 2′-O—CH₃, among others), and bicyclic sugar modified nucleosides (such bicyclic sugar modified nucleosides may include those having a 4′-(CH₂)n-O-2′ bridge, where n=1 or n=2 and 4′-CH₂—O—CH₂-2′). In certain embodiments, wings include several modified sugar moieties, including, for example, 2′-MOE. In certain embodiments, wings include several modified and unmodified sugar moieties. In certain embodiments, wings include various combinations of 2′-MOE nucleosides and 2′-deoxynucleosides.

[0405] Each distinct region can comprise uniform sugar moieties, variant, or alternating sugar moieties. The wing-gap-wing motif is frequently described as “X-Y-Z”, where “X” represents the length of the 5′ wing, “Y” represents the length of the gap, and “Z” represents the length of the 3′ wing. “X” and “Z” can comprise uniform, variant, or alternating sugar moieties. In certain embodiments, “X” and “Y” include one or more 2′-deoxynucleosides. “Y” can comprise 2′-deoxynucleosides. As used herein, a gapmer described as “X-Y-Z” can have a configuration such that the gap is positioned immediately adjacent to each of the 5′ wing and the 3′ wing. Thus, no intervening nucleotides can exist between the 5′ wing and gap, or the gap and the 3′ wing. Any of the antisense oligomers described herein can have a gapmer motif. In certain embodiments, “X” and “Z” are the same; in other cases they are different.

[0406] In certain cases, gapmers provided herein include, for example, 20-mers having a motif of 5-10-5 in the form of “X-Y-Z” as described herein. In certain embodiments, gapmers provided herein include, for example, 19-mers having a motif of 5-9-5 in the form of “X-Y-Z” as described herein. In certain embodiments, gapmers provided herein include, for example, 18-mers having a motif of 5-8-5 in the form of “X-Y-Z” as described herein. In certain embodiments, gapmers provided herein include, for example, 18-mers having a motif of 4-8-6 in the form of “X-Y-Z” as described herein. In certain embodiments, gapmers provided herein include, for example, 18-mers having a motif of 6-8-4 in the form of “X-Y-Z” as described herein. In certain embodiments, gapmers provided herein include, for example, 18-mers having a motif of 5-7-6 in the form of “X-Y-Z” as described herein.

[0407] In some cases, the antisense oligomer comprises: a 5′ region consisting of three, four, five, or six linked nucleosides (e.g., “X” part discussed above); a central region consisting of eight, nine, ten, eleven, or twelve linked nucleosides(e.g., “Y” part discussed above); and a 3′ region consisting of three, four, five, or six linked nucleosides (e.g., “Z” part discussed above). In some cases, each of the three, four, five, or six linked nucleosides in the 5′ region and each of three, four, five, or six linked nucleosides in the 3′ region comprise a modified sugar moiety, and each of the eight, nine, ten, eleven, or twelve linked nucleosides in the central region is a deoxyribonucleoside. In some cases, the modified sugar moiety includes a 2′-O-methyl moiety, a 2′-Fluoro moiety, a 2′-O-methoxyethyl moiety, or a 2′-NMA moiety, or any combination thereof. In some cases, one or more the nucleosides in the 5′ region and in the 3′ region further comprise other modification as disclosed herein. In some cases, all the nucleosides in the 5′ region and in the 3′ region further comprise other modification as disclosed herein.

### Complementarity

[0408] An agent provided herein can have a polynucleotide sequence complementary to a target nucleic acid when a sufficient number of nucleobases in the polynucleotide sequence (for instance antisense oligomer) can hydrogen bond with the corresponding nucleobases of the target nucleic acid, such that a desired effect can occur (e.g., antisense inhibition of a target nucleic acid, such as a UBE3A nucleic acid).

[0409] Non-complementary nucleobases between an agent (e.g., an antisense oligomer) and a target nucleic acid may be tolerated provided that the agent (e.g., antisense oligomer) remains able to specifically hybridize to a target nucleic acid. Moreover, an agent (e.g., antisense oligomer) can hybridize to one or more segments of a target nucleic acid such that intervening or adjacent segments are not involved in the hybridization event (e.g., a loop structure, mismatch or hairpin structure).

[0410] In certain embodiments, the agents (e.g., antisense oligomers) provided herein, or a specified portion thereof, are, or are at least, 70%, 80%, 85%, 86%, 87%, 88%, 89%, 90%, 91%, 92%, 93%, 94%, 95%, 96%, 97%, 98%, 99%, or 100% complementary to a UBE3A nucleic acid, a target region, target segment, or specified portion thereof. Percent complementarity of an antisense oligomer with a target nucleic acid can be determined using routine methods, such as using BLAST programs (basic local alignment search tools) and PowerBLAST programs known in the art (Altschul et al., J. Mol. Biol., 1990, 215, 403 410; Zhang and Madden, Genome Res., 1997, 7, 649 656). Percent homology, sequence identity or complementarity, can be determined by, for example, the Gap program (Wisconsin Sequence Analysis Package, Version 8 for Unix, Genetics Computer Group, University Research Park, Madison Wis.), using default settings, which uses the algorithm of Smith and Waterman (Adv. Appl. Math., 1981, 2, 482 489).

[0411] In certain embodiments, the agents (e.g., antisense oligomers) provided herein, or specified portions thereof, are fully complementary (i.e., 100% complementary) to a target nucleic acid, or specified portion thereof. For example, agents (e.g., antisense oligomers) provided herein can be fully complementary to a UBE3A nucleic acid, or a target region, or a target segment or target sequence thereof. As used herein, “fully complementary” can mean that each nucleobase of an antisense oligomer is capable of precise base pairing with the corresponding nucleobases of a target nucleic acid.

[0412] The location of a non-complementary nucleobase can be at the 5′ end or 3′ end of the antisense oligomer. Alternatively, the non-complementary nucleobase or nucleobases can be at an internal position of the antisense oligomer. When two or more non-complementary nucleobases are present, they can be contiguous (i.e., linked) or non-contiguous. In one embodiment, a non-complementary nucleobase is located in the wing segment of a gapmer antisense oligonucleotide.

[0413] In certain embodiments, antisense oligomers provided herein that are, or are up to 1 1, 12, 13, 14, 15, 16, 17, 18, 19, or 20 nucleobases in length comprise no more than 4, no more than 3, no more than 2, or no more than 1 non-complementary nucleobase(s) relative to a target nucleic acid, or specified portion thereof.

[0414] In certain embodiments, antisense oligomers provided herein that are, or are up to 1 1, 12, 13, 14, 15, 16, 17, 18, 19, 20, 21, 22, 23, 24, 25, 26, 27, 28, 29, or 30 nucleobases in length comprise no more than 6, no more than 5, no more than 4, no more than 3, no more than 2, or no more than 1 non-complementary nucleobase(s) relative to a target nucleic acid, or specified portion thereof.

[0415] The agents (e.g., antisense oligomers) provided herein can also include those which are complementary to a portion of a target nucleic acid. As used herein, “portion” can refer to a defined number of contiguous (i.e., linked) nucleobases within a region or segment of a target nucleic acid. A “portion” can also refer to a defined number of contiguous nucleobases of an antisense oligomer. In certain embodiments, the agents (e.g., antisense oligomers) are complementary to at least an 8 nucleobase portion of a target segment. In certain embodiments, the agents (e.g., antisense oligomers) are complementary to at least a 9 nucleobase portion of a target segment. In certain embodiments, the agents (e.g., antisense oligomers) are complementary to at least a 10 nucleobase portion of a target segment. In certain embodiments, the agents (e.g., antisense oligomers) are complementary to at least an 11 nucleobase portion of a target segment. In certain embodiments, the agents (e.g., antisense oligomers) are complementary to at least a 12 nucleobase portion of a target segment. In certain embodiments, the agents (e.g., antisense oligomers) are complementary to at least a 13 nucleobase portion of a target segment. In certain embodiments, the agents (e.g., antisense oligomers) are complementary to at least a 14 nucleobase portion of a target segment. In certain embodiments, the agents (e.g., antisense oligomers) are complementary to at least a 15 nucleobase portion of a target segment. Also contemplated are antisense oligomers that are complementary to at least a 9, 10, 1 1, 12, 13, 14, 15, 16, 17, 18, 19, 20, or more nucleobase portion of a target segment, or a range defined by any two of these values.

[0416] The agents (e.g., antisense oligomers) provided herein can also have a defined percent identity to a particular nucleotide sequence, SEQ ID NO, or portion thereof. As used herein, an antisense oligomer is identical to the sequence disclosed herein if it has the same nucleobase pairing ability. For example, a RNA which contains uracil in place of thymidine in a disclosed DNA sequence would be considered identical to the DNA sequence since both uracil and thymidine pair with adenine. Shortened and lengthened versions of the antisense oligomers described herein as well as oligomers having non-identical bases relative to the antisense oligomers provided herein also are contemplated. The non-identical bases can be adjacent to each other or dispersed throughout the antisense oligomer. Percent identity of an antisense oligomer is calculated according to the number of bases that have identical base pairing relative to the sequence to which it is being compared.

[0417] In certain embodiments, the agents (e.g., antisense oligomers), or portions thereof, are at least 70%, 75%, 80%, 85%, 90%, 95%, 96%, 97%, 98%, 99% or 100% identical to one or more of the agents (e.g., antisense oligomers) or SEQ ID NOs, or a portion thereof, disclosed herein.

[0418] In certain embodiments, a portion of the agent (e.g., antisense oligomer) is compared to an equal length portion of the target nucleic acid. In certain embodiments, an 8, 9, 10, 1 1, 12, 13, 14, 15, 16, 17, 18, 19, 20, 21, 22, 23, 24, or 25 nucleobase portion is compared to an equal length portion of the target nucleic acid.

[0419] In certain embodiments, a portion of the antisense oligonucleotide is compared to an equal length portion of the target nucleic acid. In certain embodiments, an 8, 9, 10, 11, 12, 13, 14, 15, 16, 17, 18, 19, 20, 21, 22, 23, 24, or 25 nucleobase portion is compared to an equal length portion of the target nucleic acid.

### Modifications

[0420] In some embodiments, an antisense oligomer provided herein can have one or more chemical modifications as compared to a naturally occurring nucleotide (or a native form of the antisense oligomer) that has the same or comparable polynucleotide sequence. Modifications to antisense oligomers encompass substitutions or changes to internucleoside linkages, sugar moieties, or nucleobases. Modified antisense oligomers can be preferred over native forms because of desirable properties such as, for example, enhanced cellular uptake, enhanced affinity for nucleic acid target, increased stability in the presence of nucleases, or increased inhibitory activity.

[0421] Chemically modified nucleosides can be employed to increase the binding affinity of a shortened or truncated antisense oligonucleotide for its target nucleic acid. Consequently, comparable results can often be obtained with shorter antisense oligomers that have such chemically modified nucleosides.

[0422] A nucleoside can be a base-sugar combination. The nucleobase (also known as base) portion of the nucleoside can be a heterocyclic base moiety in native form. Nucleotides are nucleosides that further include a phosphate group covalently linked to the sugar portion of the nucleoside. For those nucleosides that include a pentofuranosyl sugar, the phosphate group can be linked to the 2′, 3′, or 5′ hydroxyl moiety of the sugar. Oligonucleotides are formed through the covalent linkage of adjacent nucleosides to one another, to form a linear polymeric oligonucleotide. Within the oligonucleotide structure, the phosphate groups are commonly referred to as forming the internucleoside linkages of the oligonucleotide.

### Modified Internucleoside Linkages

[0423] The naturally occurring internucleoside linkage of RNA and DNA is a 3′ to 5′ phosphodiester linkage. Antisense oligomers provided herein can have one or more modified, i.e., non-naturally occurring, internucleoside linkages. Antisense oligomers having one or more modified intemucleotide linkages can have desirable properties such as, for example, enhanced cellular uptake, enhanced affinity for target nucleic acids, and increased stability in the presence of nucleases.

[0424] Oligonucleotides having modified internucleoside linkages can include internucleoside linkages that retain a phosphorus atom as well as internucleoside linkages that do not have a phosphorus atom. Representative phosphorus containing internucleoside linkages include, but are not limited to, phosphodiesters, phosphotriesters, methylphosphonates, phosphoramidate, and phosphorothioates.

[0425] In certain embodiments, antisense oligomers targeted to a UBE3A nucleic acid comprise one or more modified internucleoside linkages. In certain embodiments, the modified intemucleoside linkages are interspersed throughout the antisense oligomer. In certain embodiments, the modified internucleoside linkages are phosphorothioate linkages. In certain embodiments, each internucleoside linkage of an antisense oligomer is a phosphorothioate internucleoside linkage.

### Modified Sugar Moieties

[0426] Antisense oligomers provided herein can contain one or more nucleosides wherein the sugar group has been modified. Such sugar modified nucleosides can impart enhanced nuclease stability, increased binding affinity, or some other beneficial biological property to the antisense oligomers. In certain embodiments, nucleosides comprise chemically modified ribofuranose ring moieties.

[0427] Examples of chemically modified ribofuranose rings include without limitation, addition of substitute groups (including 5′ and 2′ substituent groups, bridging of non-geminal ring atoms to form bicyclic nucleic acids (BNA), replacement of the ribosyl ring oxygen atom with S, N(R), or C(R₁)(R₂)(R, R₁ and R₂ are each independently H, C₁-C₁₂ alkyl or a protecting group) and combinations thereof. Examples of chemically modified sugars include 2′-F-5′-methyl substituted nucleoside (see PCT International Application WO 2008/101157 for other disclosed 5′,2′-bis substituted nucleosides) or replacement of the ribosyl ring oxygen atom with S with further substitution at the 2′-position (see published U.S. Patent Application US2005-0130923, published on Jun. 16, 2005) or alternatively 5′-substitution of a BNA (see PCT International Application WO 2007/134181 wherein LNA is substituted with, for example, a 5′-methyl or a 5′-vinyl group).

[0428] Examples of nucleosides having modified sugar moieties include without limitation nucleosides comprising 5′-vinyl, 5′-methyl (R or S), 4′-S, 2′-F, 2′-OCH₃, 2′-OCH₂CH₃, 2′-OCH₂CH₂F, 2′-NMA, and 2′-O(CH₂)₂OCH₃ substituent groups. The substituent at the 2′ position can also be selected from allyl, amino, azido, thio, 0-allyl, O—C₁-C₁₀ alkyl, OCF₃, OCH₂F, O(CH₂)₂SCH₃, O(CH₂)₂—O—N(Rₘ)(Rₙ), O—CH₂—C(═O)—N(Rₘ)(Rₙ), and O—CH₂—C(═O)—N(R)—(CH₂)₂—N(Rₘ)(Rₙ), where each R₁, Rₘ and Rₙ is, independently, H or substituted or unsubstituted C₁-C₁₀ alkyl.

[0429] As used herein, “bicyclic nucleosides” can refer to modified nucleosides comprising a bicyclic sugar moiety. Examples of bicyclic nucleosides include, without limitation, nucleosides comprising a bridge between the 4′ and the 2′ ribosyl ring atoms. In certain embodiments, antisense oligomers provided herein include one or more bicyclic nucleosides comprising a 4′ to 2′ bridge. Examples of such 4′ to 2′ bridged bicyclic nucleosides, include, but are not limited to, one of those described in U.S. Pat. Nos. 7,399,845, 8,278,283, U.S. Patent Application Pat. Nos. 7,696,345, 7,427,672, 8,278,426, 6,268,490; 6,525, 191; 6,670,461; 6,770,748; 6,794,499; 7,034, 133; 7,053,207, 7,399,845, 7,547,684, 7,741,457, and 7,696,345; U.S. Pat. Nos.; U.S. Patent Publication No. US2008-0039618; and Chattopadhyaya et al, J. Org. Chem., 2009, 74, 1 18-134); Singh et al., Chem. Commun., 1998, 4, 455-456; Koshkin et al., Tetrahedron, 1998, 54, 3607-3630; Wahlestedt et al, Proc. Natl. Acad. Sci. U.S.A, 2000, 97, 5633-5638; Kumar et al., Bioorg. Med. Chem. Lett., 1998, 8, 2219-2222; Singh et al, J. Org. Chem., 1998, 63, 10035-10039; Srivastava et al, J. Am. Chem. Soc, 2007, 129(26) 8362-8379; Elayadi et al, Curr. Opinion Invest. Drugs, 2001, 2, 558-561; Braasch et al, Chem. Biol, 2001, 8, 1-7; and Orum et al, Curr. Opinion Mol. Ther., 2001, 3, 239-243. Each of the foregoing bicyclic nucleosides can be prepared having one or more stereochemical sugar configurations including, for example, a-L-ribofuranose and β-D-ribofuranose (see PCT international application PCT/DK98/00393, published on Mar. 25, 1999 as WO 99/14226). In certain embodiments, bicyclic sugar moieties of BNA nucleosides include, but are not limited to, described in U.S. Pat. No. 11,129,844.

[0430] The synthesis and preparation of the methyleneoxy (4′-CH₂—O-2′) BNA monomers adenine, cytosine, guanine, 5-methyl-cytosine, thymine and uracil, along with their oligomerization, and nucleic acid recognition properties have been described (Koshkin et al., Tetrahedron, 1998, 54, 3607-3630).

[0431] As used herein, “4′-2′ bicyclic nucleoside” or “4′ to 2′ bicyclic nucleoside” can refer to a bicyclic nucleoside comprising a furanose ring comprising a bridge connecting two carbon atoms of the furanose ring connects the 2′ carbon atom and the 4′ carbon atom of the sugar ring.

[0432] As used herein, “monocyclic nucleosides” can refer to nucleosides comprising modified sugar moieties that are not bicyclic sugar moieties. In certain embodiments, the sugar moiety, or sugar moiety analogue, of a nucleoside is modified or substituted at any position.

[0433] As used herein, “2′-modified sugar” can mean a furanosyl sugar modified at the 2′ position. In certain embodiments, such modifications include substituents selected from: a halide, including, but not limited to substituted and unsubstituted alkoxy, substituted and unsubstituted thioalkyl, substituted and unsubstituted amino alkyl, substituted and unsubstituted alkyl, substituted and unsubstituted allyl, and substituted and unsubstituted alkynyl. In certain embodiments, 2′ modifications are selected from substituents including, but not limited to: O[(CH₂)ₙO]ₘCH₃, O(CH₂)ₙNH₂, O(CH₂)ₙCH₃, O(CH₂)ₙF, O(CH₂)ₙONH₂, OCH₂C(═O)N(H)CH₃ and O(CH₂)ₙON[(CH₂)ₙCH₃]2, where n and m are from 1 to about 10. Other 2′-substituent groups can also be selected from: C₁-C₁₂ alkyl, substituted alkyl, alkenyl, alkynyl, alkaryl, aralkyl, O-alkaryl or O-aralkyl, SH, SCH₃, OCN, CI, Br, CN, F, CF₃, OCF₃, SOCH₃, SO₂CH₃, ONO₂, NO₂, N₃, NH₂, heterocycloalkyl, heterocycloalkaryl, aminoalkylamino, polyalkylamino, substituted silyl, an RNA cleaving group, a reporter group, an intercalator, a group for improving pharmacokinetic properties, or a group for improving the pharmacodynamic properties of an antisense oligomer, and other substituents having similar properties. In certain embodiments, modified nucleosides comprise a 2′-MOE side chain (Baker et al., J. Biol. Chem., 1997, 272, 11944-12000). Such 2′-MOE substitution have been described as having improved binding affinity compared to unmodified nucleosides and to other modified nucleosides, such as 2′-O-methyl, O-propyl, and O-aminopropyl. Oligonucleotides having the 2′-MOE substituent also have been shown to be antisense inhibitors of gene expression with promising features for in vivo use (Martin, Helv. Chim. Acta, 1995, 78, 486-504; Altmann et al., Chimia, 1996, 50, 168-176; Altmann et al., Biochem. Soc. Trans., 1996, 24, 630-637; and Altmann et al, Nucleosides Nucleotides, 1997, 16, 917-926).

[0434] As used herein, “2′-NMA” can mean a —O—CH₂—C(═O)—NH—CH₃ group in place of the 2′-OH group of a ribosyl sugar moiety. A “2′-NMA sugar moiety” or “2′-NMA moiety” is a sugar moiety with a 2′-O—CH₂—C(═O)—NH—CH₃ group in place of the 2′—OH group of a nbosyl sugar moiety. Unless otherwise indicated, a 2′-NMA sugar moiety is in the β-D configuration. “NMA” can mean O—N-methyl acetamide.

[0435] As used herein, “2′-NMA nucleoside” can mean a nucleoside comprising a 2′-NMA sugar moiety.

[0436] As used herein, “2′-F” can refer to a nucleoside comprising a sugar comprising a fluoro group at the 2′ position.

[0437] As used herein, “2′-OMe” or “2′-OCH₃” or “2′-O-methyl” each can refer to a nucleoside comprising a sugar comprising an —OCH₃ group at the 2′ position of the sugar ring.

[0438] As used herein, “MOE” or “2′-MOE” or “2′-OCH₂CH₂OCH₃” or “2′-O-methoxyethyl” each refers to a nucleoside comprising a sugar comprising a —OCH₂CH₂OCH₃ group at the 2′ position of the sugar ring.

[0439] In certain embodiments, one or more of the plurality of nucleosides is modified. In certain embodiments, an oligonucleotide comprises one or more ribonucleosides (RNA) and/or deoxyribonucleosides (DNA). In certain embodiments, an oligonucleotide comprises a mix of one or more ribonucleosides (RNA) and deoxyribonucleosides (DNA).

[0440] Many other bicyclo and tricyclo sugar surrogate ring systems are also known in the art that can be used to modify nucleosides for incorporation into antisense oligomers (see, for example, review article: Leumann, Bioorg. Med. Chem., 2002, 10, 841-854). Such ring systems can undergo various additional substitutions to enhance activity.

[0441] Methods for the preparations of modified sugars are well known to those skilled in the art.

[0442] In nucleotides having modified sugar moieties, the nucleobase moieties (natural, modified or a combination thereof) are maintained for hybridization with an appropriate nucleic acid target.

[0443] In certain embodiments, antisense oligomers comprise one or more nucleosides having modified sugar moieties. In certain embodiments, the modified sugar moiety is 2′-MOE. In certain embodiments, the 2′-MOE modified nucleosides are arranged in a gapmer motif. In certain embodiments, the modified sugar moiety is a bicyclic nucleoside having a (4′-CH(CH₃)-0-2′) bridging group. In certain embodiments, the (4′-CH(CH₃)—O-2′) modified nucleosides are arranged throughout the wings of a gapmer motif.

[0444] “5′-methylcytosine” can mean a cytosine modified with a methyl group attached to the 5′ position. A 5′-methylcytosine is a modified nucleobase.

[0445] “5′-methyluracil” can mean a uracil modified with a methyl group attached to the 5′ position. A 5′-methyluracil is a modified nucleobase.

[0446] “5′-methylthymine” can mean a thymine modified with a methyl group attached to the 5′ position. A 5′-methylthymine is a modified nucleobase.

[0447] In some cases, antisense oligomers provided herein comprise 5′-methylcytosine, 5′-methyluracil, 5′-methylthymine, or a combination thereof. In some cases, each cytosine in the antisense oligomer is methylated, i.e., having a methyl group attached to the 5′ position. In some cases, each uracil in the antisense oligomer is methylated, i.e., having a methyl group attached to the 5′ position. In some cases, the antisense oligomer has 1, 2, 3, 4, 5, 6, 7, 8, or more 5′-methylcytosine. In some cases, the antisense oligomer has 1, 2, 3, 4, 5, 6, 7, 8, or more 5′-methyluracil. In some cases, the antisense oligomer has both methylcytosine and methyluracil.

### Pharmaceutical Compositions and Methods of Treatment

[0448] In some aspects, provided herein are pharmaceutical compositions comprising an agent of the present disclosure, e.g., an antisense oligomer, or a vector encoding the agent.

[0449] Pharmaceutical compositions or formulations comprising the agent, e.g., antisense oligomer, or a vector encoding the agent, of the described compositions and for use in any of the described methods can be prepared according to conventional techniques well known in the pharmaceutical industry and described in the published literature. In some embodiments, a pharmaceutical composition or formulation for treating a subject comprises an effective amount of any antisense oligomer as described herein, or a pharmaceutically acceptable salt, solvate, hydrate or ester thereof. The pharmaceutical formulation comprising an antisense oligomer may further comprise a pharmaceutically acceptable excipient, diluent or carrier.

[0450] In some cases, antisense oligomers provided herein have an intermediate level of efficiency in reducing the level of UBE3A transcript in cells, e.g., the antisense oligomer, when provided at a maximum dosing level (maximum concentration when delivered in vitro, maximum dose when in vivo, without causing significant adverse effects to the cells or the subject), can reduce UBE3A transcript level by at most 75%, at most 70%, at most 65%, at most 60%, at most 55%, at most 50%, at most 45%, at most 40%, at most 35%, at most 30%, at most 20%, or about 25% to about 75%, about 30% to about 70%, about 35% to about 65%, about 40% to about 60%, or about 45% to about 55%. Without wishing to be bound by a certain theory, antisense oligomers provided herein that have an intermediate level of UBE3A knockdown efficiency can have desirable therapeutic applications. Intermediate level of knockdown efficiency of an antisense oligomer can be an indication that the antisense oligomer targets sequences that are not in all of UBE3A transcripts, that are not accessible to the antisense oligomer for binding at a given moment in time, or both. For instance, an antisense oligomer provided herein that can achieve about 50% maximal UBE3A knockdown efficiency in a cell can be targeting a sequence that is only present in 50% of UBE3A transcripts in the cell. Alternatively or additionally, it can be because half of the time that the target site of the antisense oligomer on the UBE3A transcript is occupied by another protein complex or otherwise physically inaccessible to the antisense oligomer. Because abnormally reduced level of UBE3A protein can also lead to pathological conditions, proper dosing of antisense oligomer that reduces UBE3A transcripts can be desired for therapeutic applications without causing adverse effects by excessively reducing the level of UBE3A transcripts. With an antisense oligomer provided herein that has an intermediate level of knockdown efficiency, there can be a ceiling to the amount of UBE3A knockdown by the antisense oligomer. Such a ceiling to the knockdown amount of UBE3A can thus create a safety buffer that prevents the antisense oligomer from excessively reducing UBE3A transcripts when administered to a subject that is in need of reducing UBE3A level, for instance, a subject that has duplication, overexpression, or a gain-of-function mutation, of UBE3A gene, or increased activity or expression level of UBE3A protein.

[0451] Agents (e.g., antisense oligomers) or vectors provided herein can be admixed with pharmaceutically acceptable active or inert substances for the preparation of pharmaceutical compositions or formulations. An agent (e.g., antisense oligomer) targeted to a UBE3A nucleic acid can be utilized in pharmaceutical compositions by combining the agent with a suitable pharmaceutically acceptable diluent or carrier. A pharmaceutically acceptable diluent can include phosphate-buffered saline (PBS), artificial cerebrospinal fluid (aCSF), physiological saline, or any other suitable solutions.

[0452] In some cases, the compositions and methods provided herein relate to a vector encoding an agent provided herein. In some cases, the vector comprises a viral vector encoding the agent. In some cases, the viral vector comprises an adenoviral vector, adeno-associated viral (AAV) vector, lentiviral vector, Herpes Simplex Virus (HSV) viral vector, or retroviral vector.

[0453] Pharmaceutically acceptable salts are suitable for use in contact with the tissues of humans and lower animals without undue toxicity, irritation, allergic response, etc., and are commensurate with a reasonable benefit/risk ratio. (See, e.g., S. M. Berge, et al., J. Pharmaceutical Sciences, 66: 1-19 (1977), incorporated herein by reference for this purpose. The salts can be prepared in situ during the final isolation and purification of the compounds, or separately by reacting the free base form with a suitable organic acid. Examples of pharmaceutically acceptable, nontoxic acid addition salts are salts of an amino group formed with inorganic acids such as hydrochloric acid, hydrobromic acid, phosphoric acid, sulfuric acid and perchloric acid or with organic acids such as acetic acid, oxalic acid, maleic acid, tartaric acid, citric acid, succinic acid or malonic acid or by using other documented methodologies such as ion exchange. Other pharmaceutically acceptable salts include adipate, alginate, ascorbate, aspartate, benzenesulfonate, benzoate, bisulfate, borate, butyrate, camphorate, camphorsulfonate, citrate, cyclopentanepropionate, digluconate, dodecylsulfate, ethanesulfonate, formate, fumarate, glucoheptonate, glycerophosphate, gluconate, hemisulfate, heptanoate, hexanoate, hydroiodide, 2-hydroxy-ethanesulfonate, lactobionate, lactate, laurate, lauryl sulfate, malate, maleate, malonate, methanesulfonate, 2-naphthalenesulfonate, nicotinate, nitrate, oleate, oxalate, palmitate, pamoate, pectinate, persulfate, 3-phenylpropionate, phosphate, picrate, pivalate, propionate, stearate, succinate, sulfate, tartrate, thiocyanate, p-toluenesulfonate, undecanoate, valerate salts, and the like. Representative alkali or alkaline earth metal salts include sodium, lithium, potassium, calcium, magnesium, and the like. Further pharmaceutically acceptable salts include, when appropriate, nontoxic ammonium, quaternary ammonium, and amine cations formed using counterions such as halide, hydroxide, carboxylate, sulfate, phosphate, nitrate, loweralkyl sulfonate and aryl sulfonate.

[0454] In some embodiments, the compositions are formulated into any of many possible dosage forms such as, but not limited to, tablets, capsules, gel capsules, liquid syrups, soft gels, suppositories, and enemas. In embodiments, the compositions are formulated as suspensions in aqueous, non-aqueous or mixed media. Aqueous suspensions may further contain substances that increase the viscosity of the suspension including, for example, sodium carboxymethylcellulose, sorbitol and/or dextran. The suspension may also contain stabilizers. In embodiments, a pharmaceutical formulation or composition of the present disclosure includes, but is not limited to, a solution, emulsion, microemulsion, foam or liposome-containing formulation (e.g., cationic or noncationic liposomes).

[0455] The pharmaceutical composition or formulation described herein may comprise one or more penetration enhancers, carriers, excipients or other active or inactive ingredients as appropriate and well known to those of skill in the art or described in the published literature. In embodiments, liposomes also include sterically stabilized liposomes, e.g., liposomes comprising one or more specialized lipids. These specialized lipids result in liposomes with enhanced circulation lifetimes. In embodiments, a sterically stabilized liposome comprises one or more glycolipids or is derivatized with one or more hydrophilic polymers, such as a polyethylene glycol (PEG) moiety. In some embodiments, a surfactant is included in the pharmaceutical formulation or compositions. The use of surfactants in drug products, formulations and emulsions is well known in the art. In embodiments, the present disclosure employs a penetration enhancer to effect the efficient delivery of the antisense oligonucleotide, e.g., to aid diffusion across cell membranes and/or enhance the permeability of a lipophilic drug. In some embodiments, the penetration enhancers are a surfactant, fatty acid, bile salt, chelating agent, or non-chelating nonsurfactant.

[0456] In some embodiments, the pharmaceutical formulation comprises multiple agents (e.g., antisense oligomers). In embodiments, the agent (e.g., antisense oligomer) or a vector encoding the agent is administered in combination with another drug or therapeutic agent.

[0457] Pharmaceutical compositions comprising antisense oligomers can encompass any pharmaceutically acceptable salts, esters, or salts of such esters, or any other oligonucleotide which, upon administration to an animal, including a human, is capable of providing (directly or indirectly) the biologically active metabolite or residue thereof. Accordingly, for example, the disclosure is also drawn to pharmaceutically acceptable salts of antisense oligomers, prodrugs, pharmaceutically acceptable salts of such prodrugs, and other bioequivalents. Suitable pharmaceutically acceptable salts include, but are not limited to, sodium and potassium salts.

[0458] A prodrug can include the incorporation of additional nucleosides at one or both ends of an antisense oligomer which are cleaved by endogenous nucleases within the body, to form the active antisense oligomer.

[0459] Antisense oligomers disclosed herein can be covalently linked to one or more moieties or conjugates which enhance the activity, cellular distribution or cellular uptake of the resulting antisense oligomers. Conjugate groups can include cholesterol moieties and lipid moieties. Additional conjugate groups can include carbohydrates, phospholipids, biotin, phenazine, folate, phenanthridine, anthraquinone, acridine, fluoresceins, rhodamines, coumarins, and dyes.

[0460] Antisense oligomers of the present disclosure can also be modified to have one or more stabilizing groups that are generally attached to one or both termini of antisense oligomers to enhance properties such as, for example, nuclease stability. Included in stabilizing groups are cap structures. These terminal modifications can protect the antisense oligomer having terminal nucleic acid from exonuclease degradation, and can help in delivery and/or localization within a cell. The cap can be present at the 5′-terminus (5′-cap), or at the 3′-terminus (3′-cap), or can be present on both termini. Cap structures can include, for example, inverted deoxy abasic caps. Further 3′ and 5′-stabilizing groups that can be used to cap one or both ends of an antisense oligomer to impart nuclease stability can include those disclosed in WO 03/004602 published on Jan. 16, 2003.

[0461] Any of the compositions provided herein can be administered to an individual. “Individual” can be used interchangeably with “subject” or “patient.” An individual can be a mammal, for example, a human or animal such as a non-human primate, a rodent, a rabbit, a rat, a mouse, a horse, a donkey, a goat, a cat, a dog, a cow, a pig, or a sheep. In embodiments, the individual is a human. In embodiments, the individual is a fetus, an embryo, or a child. In some embodiments, the compositions provided herein are administered to a cell ex vivo.

[0462] In some embodiments, the compositions provided herein are administered to an individual as a method of treating a disease or disorder. In certain embodiments, the individual has a neurological disorder. In some cases, the individual has a disease or disorder associated with excessive expression level or activity level of UBE3A protein. In some cases, the disease or disorder the composition provided herein is applicable to relates to duplication, overexpression, or a gain-of-function mutation, of a UBE3A gene, for instance, a duplication of chromosome 15q11.2-q13.1, Dup15q syndrome.

[0463] Dupl5q syndrome is one of the most common genetic variants associated with autism spectrum disorder (ASD), which is associated with duplication of chromosome 15q11.2-q13.1. This chromosomal region includes the imprinted Prader-Willi/Angelman syndrome critical region (PWACR), ubiquitin protein ligase E3A (UBE3A), small nuclear ribonucleoprotein polypeptide N (SNRPN), and three GABAA receptor genes (GABRB3, GABRA5, and GABRG3). Dup15q syndrome can include two primary types of duplications of 1511.2-13.1: (1) an isodicentric chromosome 15 (idic(15)) that results in two additional maternally derived copies on a supernumerary chromosome that includes 15p and the proximal region of 15q11, most commonly leading to four copies of the region, or (2) an interstitial 15q duplication in which one extra copy of the 15q11.2-q13.1 region occurs on the same chromosome arm, typically resulting in three copies of the region, and has an overall milder phenotype. Duplication of 15q11.2-q13.1 confers a strong risk for autism spectrum disorder, epilepsy, and intellectual disability in the patients. Studies have shown that patients with Dup15q syndrome can exhibit a number of symptoms, including certain behavior profile, such as relative weakness in the areas of motor skills, facial expression, social smile, and reciprocal social interaction. Patients with Dup15q syndrome can also present a distinctive electroencephalography (EEG) signature in the form of high amplitude spontaneous beta frequency (12-30 Hz) oscillations.

[0464] In certain embodiments, provided herein are methods for prophylactically reducing UBE3A expression in an individual. Certain embodiments include treating an individual in need thereof by administering to an individual a therapeutically effective amount of an agent (e.g., an antisense oligomer), or a vector encoding the agent, which is targeted to a UBE3A nucleic acid.

[0465] In some embodiments, the individual has a genetic disease, such as any of the diseases described herein. In some embodiments, the individual is at risk of having a disease, such as any of the diseases described herein. In some embodiments, the individual is at increased risk of having a disease or disorder caused by insufficient amount of a protein or insufficient activity of a protein. If an individual is “at an increased risk” of having a disease or disorder caused insufficient amount of a protein or insufficient activity of a protein, the method involves preventative or prophylactic treatment. For example, an individual may be at an increased risk of having such a disease or disorder because of family history of the disease. Typically, individuals at an increased risk of having such a disease or disorder benefit from prophylactic treatment (e.g., by preventing or delaying the onset or progression of the disease or disorder). In embodiments, a fetus is treated in utero, e.g., by administering the agent (e.g., antisense oligomer) or a vector encoding the agent to the fetus directly or indirectly (e.g., via the mother).

[0466] In one embodiment, administration of a therapeutically effective amount of an antisense oligomer targeted to a UBE3A nucleic acid is accompanied by monitoring of UBE3A levels in an individual, to determine an individual's response to administration of the antisense oligomer. An individual's response to administration of the antisense oligomer can be used by a physician to determine the amount and duration of therapeutic intervention.

[0467] In certain embodiments, administration of an antisense oligomer targeted to a UBE3A nucleic acid results in reduction of the processed mRNA encoding the UBE3A protein (e.g., UBE3A mRNA) and or protein expression by at least 15, 20, 25, 30, 35, 40, 45, 50, 55, 56, 57, 58, 59, 60, 61, 62, 63, 64, 65, 66, 67, 68, 69, 70, 71, 72, 73, 74, 75, 76, 77, 78, 79, 80, 81, 82, 83, 84, 85, 86, 87, 88, 89, 90, 91, 92, 93, 94, 95, 96, 97, 98, 99, or 100%, or a range defined by any two of these values.

[0468] In some embodiments, the level of the processed mRNA encoding the UBE3A protein (e.g., UBE3A mRNA) in the cell contacted with the agent or the vector is decreased by about 10% to about 99%, about 10% to about 95%, about 10% to about 90%, about 10% to about 80%, about 10% to about 70%, about 10% to about 60%, about 10% to about 50%, about 10% to about 40%, about 10% to about 30%, about 10% to about 20%, about 20% to about 90%, about 20% to about 80%, about 20% to about 70%, about 20% to about 60%, about 20% to about 50%, about 20% to about 40%, about 20% to about 30%, about 30% to about 80%, about 30% to about 70%, about 30% to about 60%, about 30% to about 50%, about 40% to about 70%, about 40% to about 60%, about 40% to about 50%, about 50% to about 99%, about 50% to about 95%, about 50% to about 90%, about 50% to about 80%, about 50% to about 70%, about 50% to about 60%, about 60% to about 99%, about 60% to about 95%, about 60% to about 90%, about 60% to about 80%, about 60% to about 70%, about 70% to about 99%, about 70% to about 95%, about 70% to about 90%, about 70% to about 80%, about 80% to about 99%, about 80% to about 95%, about 80% to about 90%, about 90% to about 99%, about 90% to about 95%, or about 95% to about 99%, as compared to an otherwise same cell not contacted with the agent or the vector.

[0469] In some embodiments, the level of the processed mRNA encoding the UBE3A protein (e.g., UBE3A mRNA) in the cell contacted with the agent or the vector is decreased by at least about 10%, at least about 15%, at least about 20%, at least about 25%, at least about 30%, at least about 35%, at least about 40%, at least about 45%, at least about 50%, at least about 55%, at least about 60%, at least about 65%, at least about 70%, at least about 75%, at least about 80%, at least about 85%, at least about 90%, at least about 95%, or at least about 99%, as compared to an otherwise same cell not contacted with the agent or the vector.

[0470] In some cases, the method and composition provided herein reduces a level of the UBE3A protein in the cell. In some embodiments, the level of the UBE3A protein in the cell contacted with the agent or the vector is decreased by about 10% to about 99%, about 10% to about 95%, about 10% to about 90%, about 10% to about 80%, about 10% to about 70%, about 10% to about 60%, about 10% to about 50%, about 10% to about 40%, about 10% to about 30%, about 10% to about 20%, about 20% to about 90%, about 20% to about 80%, about 20% to about 70%, about 20% to about 60%, about 20% to about 50%, about 20% to about 40%, about 20% to about 30%, about 30% to about 80%, about 30% to about 70%, about 30% to about 60%, about 30% to about 50%, about 40% to about 70%, about 40% to about 60%, about 40% to about 50%, about 50% to about 99%, about 50% to about 95%, about 50% to about 90%, about 50% to about 80%, about 50% to about 70%, about 50% to about 60%, about 60% to about 99%, about 60% to about 95%, about 60% to about 90%, about 60% to about 80%, about 60% to about 70%, about 70% to about 99%, about 70% to about 95%, about 70% to about 90%, about 70% to about 80%, about 80% to about 99%, about 80% to about 95%, about 80% to about 90%, about 90% to about 99%, about 90% to about 95%, or about 95% to about 99%, as compared to an otherwise same cell not contacted with the agent or the vector. In some cases, the level of the UBE3A protein in the cell contacted with the agent or the vector is decreased by at least about 10%, at least about 15%, at least about 20%, at least about 25%, at least about 30%, at least about 35%, at least about 40%, at least about 45%, at least about 50%, at least about 55%, at least about 60%, at least about 65%, at least about 70%, at least about 75%, at least about 80%, at least about 85%, at least about 90%, at least about 95%, or at least about 99%, as compared to an otherwise same cell not contacted with the agent or the vector.

[0471] In certain embodiments, administration of an antisense oligomer targeted to a UBE3A nucleic acid results in improved cognitive function in an animal. In certain embodiments, administration of a UBE3A antisense oligomer improves cognitive function by at least 15, 20, 25, 30, 35, 40, 45, 50, 55, 56, 57, 58, 59, 60, 61, 62, 63, 64, 65, 66, 67, 68, 69, 70, 71, 72, 73, 74, 75, 76, 77, 78, 79, 80, 81, 82, 83, 84, 85, 86, 87, 88, 89, 90, 91, 92, 93, 94, 95, 96, 97, 98, 99, or 100%, or a range defined by any two of these values.

[0472] In certain embodiments, administration of an antisense oligomer targeted to a UBE3A nucleic acid results in improved motor function in an animal. In certain embodiments, administration of a UBE3A antisense oligomer improves cognitive function by at least 15, 20, 25, 30, 35, 40, 45, 50, 55, 56, 57, 58, 59, 60, 61, 62, 63, 64, 65, 66, 67, 68, 69, 70, 71, 72, 73, 74, 75, 76, 77, 78, 79, 80, 81, 82, 83, 84, 85, 86, 87, 88, 89, 90, 91, 92, 93, 94, 95, 96, 97, 98, 99, or 100%, or a range defined by any two of these values.

[0473] In certain embodiments, administration of an antisense oligomer targeted to a UBE3A nucleic acid results in improved anxiety in an animal. In certain embodiments, administration of a UBE3A antisense oligomer improves anxiety by at least 15, 20, 25, 30, 35, 40, 45, 50, 55, 56, 57, 58, 59, 60, 61, 62, 63, 64, 65, 66, 67, 68, 69, 70, 71, 72, 73, 74, 75, 76, 77, 78, 79, 80, 81, 82, 83, 84, 85, 86, 87, 88, 89, 90, 91, 92, 93, 94, 95, 96, 97, 98, 99, or 100%, or a range defined by any two of these values. In certain embodiments, administration of an antisense oligomer targeted to a UBE3A nucleic acid results in improved social interaction in an animal. In certain embodiments, administration of a UBE3A antisense oligomer improves social interaction by at least 15, 20, 25, 30, 35, 40, 45, 50, 55, 56, 57, 58, 59, 60, 61, 62, 63, 64, 65, 66, 67, 68, 69, 70, 71, 72, 73, 74, 75, 76, 77, 78, 79, 80, 81, 82, 83, 84, 85, 86, 87, 88, 89, 90, 91, 92, 93, 94, 95, 96, 97, 98, 99, or 100%, or a range defined by any two of these values. In certain embodiments, administration of an antisense oligomer targeted to a UBE3A nucleic acid results in reduction of seizures. In certain embodiments, administration of a UBE3A antisense oligomer reduces seizures by at least 15, 20, 25, 30, 35, 40, 45, 50, 55, 56, 57, 58, 59, 60, 61, 62, 63, 64, 65, 66, 67, 68, 69, 70, 71, 72, 73, 74, 75, 76, 77, 78, 79, 80, 81, 82, 83, 84, 85, 86, 87, 88, 89, 90, 91, 92, 93, 94, 95, 96, 97, 98, 99, or 100%, or a range defined by any two of these values. In certain embodiments, administration of an antisense oligomer targeted to a UBE3A nucleic acid results in normalized EEG discharges.

[0474] In certain embodiments, pharmaceutical compositions comprising an antisense oligomer targeted to UBE3A are used for the preparation of a medicament for treating a patient suffering or susceptible to a disorder including Dup15q syndrome.

[0475] Suitable routes for administration of agents (e.g., antisense oligomers) or a vector encoding the agent of the present disclosure can vary depending on cell type to which delivery of the agents or the vector is desired. The agent or vector encoding the agent of the present disclosure can be administered to patients parenterally, for example, by intrathecal injection, intracerebroventricular injection, intra cisterna magna injection, intraperitoneal injection, intramuscular injection, subcutaneous injection, or intravenous injection.

[0476] In embodiments, the antisense oligomer is administered with one or more agents capable of promoting penetration of the subject antisense oligomer across the blood-brain barrier by any method known in the art. For example, delivery of agents by administration of an adenovirus vector to motor neurons in muscle tissue is described in U.S. Pat. No. 6,632,427, incorporated herein by reference. Delivery of vectors directly to the brain, e.g., the striatum, the thalamus, the hippocampus, or the substantia nigra, is described, e.g., in U.S. Pat. No. 6,756,523, incorporated herein by reference.

[0477] In some embodiments, the antisense oligomers are linked or conjugated with agents that provide desirable pharmaceutical or pharmacodynamic properties. In embodiments, the antisense oligomer is coupled to a substance, known in the art to promote penetration or transport across the blood-brain barrier, e.g., an antibody to the transferrin receptor. In embodiments, the antisense oligonucleotide is linked with a viral vector, e.g., to render the antisense oligomer more effective or increase transport across the blood-brain barrier. In embodiments, osmotic blood brain barrier disruption is assisted by infusion of sugars, e.g., meso erythritol, xylitol, D(+) galactose, D(+) lactose, D(+) xylose, dulcitol, myo-inositol, L(−) fructose, D(−) mannitol, D(+) glucose, D(+) arabinose, D(−) arabinose, cellobiose, D(+) maltose, D(+) raffinose, L(+) rhamnose, D(+) melibiose, D(−) ribose, adonitol, D(+) arabitol, L(−) arabitol, D(+) fucose, L(−) fucose, D(−) lyxose, L(+) lyxose, and L(−) lyxose, or amino acids, e.g., glutamine, lysine, arginine, asparagine, aspartic acid, cysteine, glutamic acid, glycine, histidine, leucine, methionine, phenylalanine, proline, serine, threonine, tyrosine, valine, and taurine. Methods and materials for enhancing blood brain barrier penetration are described, e.g., in U.S. Pat. Nos. 9,193,969, 4,866,042, 6,294,520, and 6,936,589, each incorporated herein by reference.

[0478] In some embodiments, subjects treated using the methods and compositions are evaluated for improvement in condition using any methods known and described in the art.

[0479] The effects of the agent (e.g., antisense oligomer) provided herein on the level, activity or expression of UBE3A nucleic acids or UBE3A protein can be tested in vitro in a variety of cell types. Illustrative cell types include, but are not limited to, Hela cells, HSO2 cells, 293T cells, HepG2 cells, Hep3B cells, and primary hepatocytes.

[0480] In some aspects, provided herein are methods for treatment of cells with agents (e.g., antisense oligomers). Cells can be treated with agents (e.g., antisense oligomers) or a vector encoding the agent when the cells reach approximately 60-80% confluency in culture.

[0481] For instance, the antisense oligomer can be introduced into cultured cells with aid of cationic lipid transfection reagent LIPOFECTIN (Invitrogen, Carlsbad, CA). Antisense oligomers can be mixed with LIPOFECTIN in OPTI-MEM 1 (Invitrogen, Carlsbad, CA) to achieve the desired final concentration of antisense oligomer and a LIPOFECTIN concentration that may range from 2 to 12 μg/mL per 100 nM antisense oligonucleotide. The antisense oligomer can also be introduced into cultured cells with the aid of LIPOFECTAMINE (Invitrogen, Carlsbad, CA). Antisense oligomer can mixed with LIPOFECTAMINE in OPTI-MEM 1 reduced serum medium (Invitrogen, Carlsbad, CA) to achieve the desired concentration of antisense oligonucleotide and a LIPOFECTAMINE concentration that may range from 2 to 12 μg/mL per 100 nM antisense oligonucleotide. Another reagent that can be used to introduce antisense oligomers into cultured cells is TURBOFECT (Thermo Scientific, Carlsbad, CA).

[0482] In some cases, antisense oligomers are introduced into cultured cells via electroporation.

[0483] Antisense inhibition of UBE3A nucleic acids can be assessed by measuring UBE3A protein levels or UBE3A mRNA transcript levels. UBE3A mRNA transcript levels can be measured by routine techniques in the art, such as real time PCR. Protein levels of UBE3A can be evaluated or quantitated in a variety of ways well known in the art, such as immunoprecipitation, Western blot analysis (immunoblotting), enzyme-linked immunosorbent assay (ELISA), quantitative protein assays, protein activity assays (for example, caspase activity assays), immunohistochemistry, immunocytochemistry or fluorescence-activated cell sorting (FACS). Antibodies directed to a target can be identified and obtained from a variety of sources, such as the MSRS catalog of antibodies (Aerie Corporation, Birmingham, MI), or can be prepared via conventional monoclonal or polyclonal antibody generation methods well known in the art.

### In Vivo Testing of Antisense Oligomers

[0484] Antisense oligomers, for example, antisense oligonucleotides, are tested in animals to assess their ability to inhibit expression of UBE3A and produce phenotypic changes, such as, improved behavior, motor function, and cognition. In certain embodiments, motor function is measured by walking initiation analysis, rotarod, grip strength, pole climb, open field performance, balance beam, hind_paw footprint testing in the animal. In certain embodiments, behavior is measured by elevated plus maze and three-chamber social interaction. Testing can be performed in normal animals, or in experimental models. Following a period of treatment with antisense oligonucleotides, RNA can be isolated from CNS tissue or CSF and changes in UBE3A nucleic acid expression can be measured.

### Exemplary Embodiments

[0485] [1]A method of reducing expression of a UBE3A protein in a mammalian cell having duplication, overexpression, or a gain-of-function mutation, of a UBE3A gene that encodes the UBE3A protein, the method comprising contacting an agent or a vector encoding the agent to the mammalian cell, wherein the agent reduces a level of a processed mRNA encoding the UBE3A protein in the mammalian cell.

[0486] [2] The method of paragraph [1], wherein the agent comprises a polynucleotide sequence that is at least 80% complementary to at least 8 contiguous nucleic acids of the sequence set forth in any one of SEQ ID NO: 93-120.

[0487] [3] The method of paragraph [1], wherein the agent comprises a polynucleotide sequence that is at least 80% complementary to at least 8 contiguous nucleic acids of each mRNA transcript listed in Table 2.

[0488] [4] The method of any one of paragraphs [1]-[3], wherein the agent comprises an antisense oligomer.

[0489] [5] The method of paragraph [4], wherein the agent comprises an antisense oligomer with at least 80% identity to the sequence set forth in any one of SEQ ID NO: 1-92.

[0490] [6]A method of modulating expression of a UBE3A gene encoding a UBE3A protein in a mammalian cell, the method comprising contacting an agent or a vector encoding the agent to the mammalian cell, wherein the agent comprises a polynucleotide sequence that comprises an antisense oligomer with at least 80% identity to the sequence set forth in any one of SEQ ID NO: 1-92.

[0491] [7] The method of any one of paragraphs [4]-[6], wherein the antisense oligomer comprises a backbone modification, a modified sugar moiety or a combination thereof.

[0492] [8] The method of any one of paragraphs [4]-[7], wherein the antisense oligomer comprises a phosphorothioate linkage or a phosphorodiamidate linkage.

[0493] [9] The method of any one of paragraphs [4]-[8], wherein the antisense oligomer comprises a phosphorodiamidate morpholino, a locked nucleic acid, a peptide nucleic acid, a 2′-O-methyl moiety, a 2′-Fluoro moiety, a 2′-O-methoxyethyl moiety, or a 2′-NMA moiety.

[0494] [10] The method of any one of paragraphs [4]-[9], wherein the antisense oligomer comprises at least one modified sugar moiety.

[0495] [11] The method of any one of paragraphs [4]-[10], wherein the antisense oligomer comprises at least one, two, three, four, five, or six modified nucleosides at a 5′ end of the antisense oligomer.

[0496] [12] The method of any one of paragraphs [4]-[10], wherein the antisense oligomer comprises one, two, three, four, five, or six modified nucleosides at a 5′ end of the antisense oligomer.

[0497] [13] The method of any one of paragraphs [4]-[10], wherein the antisense oligomer comprises one, two, three, four, five, or six 2′-O-methoxyethyl modified nucleosides at a 5′ end of the antisense oligomer.

[0498] [14] The method of any one of paragraphs [4]-[13], wherein the antisense oligomer comprises at least one, two, three, four, five, or six modified nucleosides at a 3′ end of the antisense oligomer.

[0499] [15] The method of any one of paragraphs [4]-[13], wherein the antisense oligomer comprises one, two, three, four, five, or six modified nucleosides at a 3′ end of the antisense oligomer.

[0500] [16] The method of any one of paragraphs [4]-[13], wherein the antisense oligomer comprises one, two, three, four, five, or six 2′-O-methoxyethyl modified nucleosides at a 3′ end of the antisense oligomer.

[0501] [17] The method of any one of paragraphs [4]-[16], wherein the antisense oligomer comprises three, four, five, or six 2′-O-methoxyethyl modified nucleosides at a 5′ end of the antisense oligomer; three, four, five, or six 2′-O-methoxyethyl modified nucleosides at a 3′ end of the antisense oligomer; and a phosphorothioate linkage between any two neighboring nucleosides of the antisense oligomer.

[0502] [18] The method of any one of paragraphs [4]-[16], wherein the antisense oligomer comprises:
[0503] a 5′ region consisting of three, four, five, or six linked nucleosides;
[0504] a central region consisting of eight, nine, ten, eleven, or twelve linked nucleosides; and
[0505] a 3′ region consisting of three, four, five, or six linked nucleosides;
[0506] wherein each of the three, four, five, or six linked nucleosides in the 5′ region and each of three, four, five, or six linked nucleosides in the 3′ region comprise a modified sugar moiety, and wherein each of the eight, nine, ten, eleven, or twelve linked nucleosides in the central region is a deoxyribonucleoside.

[0507] [19] The method of any one of paragraphs [4]-[18], wherein the antisense oligomer consists of from 8 to 50 nucleobases, 8 to 40 nucleobases, 8 to 35 nucleobases, 8 to 30 nucleobases, 8 to 25 nucleobases, 8 to 20 nucleobases, 8 to 15 nucleobases, 10 to 50 nucleobases, 10 to 40 nucleobases, 10 to 35 nucleobases, 10 to 30 nucleobases, 10 to 25 nucleobases, 10 to 20 nucleobases, 10 to 15 nucleobases, 12 to 50 nucleobases, 12 to 40 nucleobases, 12 to 35 nucleobases, 12 to 30 nucleobases, 12 to 25 nucleobases, 12 to 20 nucleobases, 12 to 15 nucleobases, 15 to 50 nucleobases, 15 to 40 nucleobases, 15 to 35 nucleobases, 15 to 30 nucleobases, 15 to 25 nucleobases, 15 to 20 nucleobases, 15 to 19 nucleobases, 15 to 18 nucleobases, 15 to 16 nucleobases, 16 to 20 nucleobases, 16 to 19 nucleobases, 16 to 18 nucleobases, 17 to 20 nucleobases, 17 to 19 nucleobases, or 18 to 20 nucleobases.

[0508] [20] The method of any one of paragraphs [4]-[16], wherein the antisense oligomer is a modified oligonucleotide comprising the sequence set forth in any one of SEQ ID NO: 154-189 or 192-247.

[0509] [21] The method of any one of paragraphs [4]-[16], wherein the antisense oligomer is a modified oligonucleotide consisting of the sequence set forth in any one of SEQ ID NO: 154-189 or 192-247.

[0510] [22] The method of any one of paragraphs [1] to [6], wherein the vector comprises a viral vector encoding the agent.

[0511] [23] The method of paragraph [22], wherein the viral vector comprises an adenoviral vector, adeno-associated viral (AAV) vector, lentiviral vector, Herpes Simplex Virus (HSV) viral vector, or retroviral vector.

[0512] [24] The method of any one of paragraphs [4]-[23], wherein the antisense oligomer comprises a sequence with at least 90% identity to the sequence set forth in any one of SEQ ID NO: 1-92.

[0513] [25] The method of any one of paragraphs [4]-[23], wherein the antisense oligomer comprises a sequence with 100% identity to the sequence set forth in any one of SEQ ID NO: 1-92.

[0514] [26] The method of any one of paragraphs [4]-[23], wherein the antisense oligomer consists of a sequence with at least 80% identity to the sequence set forth in any one of SEQ ID NO: 1-92.

[0515] [27] The method of any one of paragraphs [4]-[23], wherein the antisense oligomer consists of a sequence with at least 90% identity to the sequence set forth in any one of SEQ ID NO: 1-92.

[0516] [28] The method of any one of paragraphs [4]-[23], wherein the antisense oligomer consists of a sequence with 100% identity to the sequence set forth in any one of SEQ ID NO: 1-92.

[0517] [29] The method of any one of paragraphs [6]-[28], wherein the method reduces a level of processed mRNA encoding the UBE3A protein in the mammalian cell.

[0518] [30] The method of any one of paragraphs [1]-[5] or [7]-[29], wherein the level of the processed mRNA encoding the UBE3A protein in the mammalian cell contacted with the agent or the vector is decreased by about 10% to about 99%, about 10% to about 95%, about 10% to about 90%, about 10% to about 80%, about 10% to about 70%, about 10% to about 60%, about 10% to about 50%, about 10% to about 40%, about 10% to about 30%, about 10% to about 20%, about 20% to about 90%, about 20% to about 80%, about 20% to about 70%, about 20% to about 60%, about 20% to about 50%, about 20% to about 40%, about 20% to about 30%, about 30% to about 80%, about 30% to about 70%, about 30% to about 60%, about 30% to about 50%, about 40% to about 70%, about 40% to about 60%, about 40% to about 50%, about 50% to about 99%, about 50% to about 95%, about 50% to about 90%, about 50% to about 80%, about 50% to about 70%, about 50% to about 60%, about 60% to about 99%, about 60% to about 95%, about 60% to about 90%, about 60% to about 80%, about 60% to about 70%, about 70% to about 99%, about 70% to about 95%, about 70% to about 90%, about 70% to about 80%, about 80% to about 99%, about 80% to about 95%, about 80% to about 90%, about 90% to about 99%, about 90% to about 95%, or about 95% to about 99%, as compared to an otherwise same cell not contacted with the agent or the vector.

[0519] [31] The method of any one of paragraphs [1]-[5] or [7]-[29], wherein the level of the processed mRNA encoding the UBE3A protein in the mammalian cell contacted with the agent or the vector is decreased by at least about 10%, at least about 15%, at least about 20%, at least about 25%, at least about 30%, at least about 35%, at least about 40%, at least about 45%, at least about 50%, at least about 55%, at least about 60%, at least about 65%, at least about 70%, at least about 75%, at least about 80%, at least about 85%, at least about 90%, at least about 95%, or at least about 99%, as compared to an otherwise same mammalian cell not contacted with the agent or the vector.

[0520] [32] The method of any one of paragraphs [1]-[31], wherein the method reduces a level of the UBE3A protein in the mammalian cell.

[0521] [33] The method of paragraph [32], wherein the level of the UBE3A protein in the mammalian cell contacted with the agent or the vector is decreased by about 10% to about 99%, about 10% to about 95%, about 10% to about 90%, about 10% to about 80%, about 10% to about 70%, about 10% to about 60%, about 10% to about 50%, about 10% to about 40%, about 10% to about 30%, about 10% to about 20%, about 20% to about 90%, about 20% to about 80%, about 20% to about 70%, about 20% to about 60%, about 20% to about 50%, about 20% to about 40%, about 20% to about 30%, about 30% to about 80%, about 30% to about 70%, about 30% to about 60%, about 30% to about 50%, about 40% to about 70%, about 40% to about 60%, about 40% to about 50%, about 50% to about 99%, about 50% to about 95%, about 50% to about 90%, about 50% to about 80%, about 50% to about 70%, about 50% to about 60%, about 60% to about 99%, about 60% to about 95%, about 60% to about 90%, about 60% to about 80%, about 60% to about 70%, about 70% to about 99%, about 70% to about 95%, about 70% to about 90%, about 70% to about 80%, about 80% to about 99%, about 80% to about 95%, about 80% to about 90%, about 90% to about 99%, about 90% to about 95%, or about 95% to about 99%, as compared to an otherwise same cell not contacted with the agent or the vector.

[0522] [34] The method of paragraph [32], wherein the level of the UBE3A protein in the mammalian cell contacted with the agent or the vector is decreased by at least about 10%, at least about 15%, at least about 20%, at least about 25%, at least about 30%, at least about 35%, at least about 40%, at least about 45%, at least about 50%, at least about 55%, at least about 60%, at least about 65%, at least about 70%, at least about 75%, at least about 80%, at least about 85%, at least about 90%, at least about 95%, or at least about 99%, as compared to an otherwise same cell not contacted with the agent or the vector.

[0523] [35] The method of any one of paragraphs [1]-[34], wherein the method comprises contacting the agent or the vector to a population of mammalian cells.

[0524] [36] The method of paragraph [35], wherein the agent reduces a level of the processed mRNA encoding the UBE3A protein in the population of mammalian cells by at most about 75%, at most about 70%, at most about 60%, at most about 50%, at most about 40%, at most about 30%, or at most about 20%, as compared to an otherwise same population of mammalian cells not contacted with the agent or the vector.

[0525] [37] The method of paragraph [35] or [36], wherein the agent reduces a level of the UBE3A protein in the population of mammalian cells by at most about 75%, at most about 70%, at most about 60%, at most about 50%, at most about 40%, at most about 30%, or at most about 20%, as compared to an otherwise same population of cells not contacted with the agent or the vector.

[0526] [38] The method of any one of paragraph [1] to [37], wherein the mammalian cell is ex vivo.

[0527] [39] The method of any one of paragraph [1] to [37], wherein the mammalian cell is in vivo.

[0528] [40] The method of any one of paragraph [1] to [39], wherein genome of the mammalian cell has a duplication of a genomic region that encompasses the UBE3A gene encoding the UBE3A protein.

[0529] [41] The method of any one of paragraph [1] to [39], wherein the mammalian cell is a human cell, and wherein genome of the mammalian cell has a duplication of chromosome 15q1.2-q13.1.

[0530] [42] The method of any one of paragraph [1] to [38], wherein the mammalian cell is obtained from a human subject suffering from Dup15q syndrome, or a progeny of a sample cell obtained from the human subject.

[0531] [43] An antisense oligomer that comprises a sequence with at least 80% identity to the sequence set forth in any one of SEQ ID NO: 1-92.

[0532] [44] The antisense oligomer of paragraph [43], wherein the antisense oligomer comprises a backbone modification, a modified sugar moiety or a combination thereof.

[0533] [45] The antisense oligomer of paragraph [43] or [44], wherein the antisense oligomer comprises a phosphorothioate linkage or a phosphorodiamidate linkage.

[0534] [46] The antisense oligomer of any one of paragraphs [43]-[45], wherein the antisense oligomer comprises a phosphorodiamidate morpholino, a locked nucleic acid, a peptide nucleic acid, a 2′-O-methyl moiety, a 2′-Fluoro moiety, a 2′-O-methoxyethyl moiety, or a 2′-NMA moiety.

[0535] [47] The antisense oligomer of any one of paragraphs [43]-[46], wherein the antisense oligomer comprises at least one modified sugar moiety.

[0536] [48] The antisense oligomer of any one of paragraphs [43]-[47], wherein the antisense oligomer comprises at least one, two, three, four, five, or six modified nucleosides at a 5′ end of the antisense oligomer.

[0537] [49] The antisense oligomer of any one of paragraphs [43]-[47], wherein the antisense oligomer comprises one, two, three, four, five, or six modified nucleosides at a 5′ end of the antisense oligomer.

[0538] [50] The antisense oligomer of any one of paragraphs [43]-[47], wherein the antisense oligomer comprises one, two, three, four, five, or six 2′-O-methoxyethyl modified nucleosides at a 5′ end of the antisense oligomer.

[0539] [51] The antisense oligomer of any one of paragraphs [43]-[50], wherein the antisense oligomer comprises at least one, two, three, four, five, or six modified nucleosides at a 3′ end of the antisense oligomer.

[0540] [52] The antisense oligomer of any one of paragraphs [43]-[50], wherein the antisense oligomer comprises one, two, three, four, five, or six modified nucleosides at a 3′ end of the antisense oligomer.

[0541] [53] The antisense oligomer of any one of paragraphs [43]-[50], wherein the antisense oligomer comprises one, two, three, four, five, or six 2′-O-methoxyethyl modified nucleosides at a 3′ end of the antisense oligomer.

[0542] [54] The antisense oligomer of any one of paragraphs [43]-[53], wherein the antisense oligomer comprises three, four, five, or six 2′-O-methoxyethyl modified nucleosides at a 5′ end of the antisense oligomer; three, four, five, or six 2′-O-methoxyethyl modified nucleosides at a 3′ end of the antisense oligomer; and a phosphorothioate linkage between any two neighboring nucleosides of the antisense oligomer.

[0543] [55] The antisense oligomer of any one of paragraphs [43]-[53], wherein the antisense oligomer comprises:
[0544] a 5′ region consisting of three, four, five, or six linked nucleosides;
[0545] a central region consisting of eight, nine, ten, eleven, or twelve linked nucleosides; and
[0546] a 3′ region consisting of three, four, five, or six linked nucleosides;
[0547] wherein each of the three, four, five, or six linked nucleosides in the 5′ region and each of three, four, five, or six linked nucleosides in the 3′ region comprise a modified sugar moiety, and wherein each of the eight, nine, ten, eleven, or twelve linked nucleosides in the central region is a deoxyribonucleoside.

[0548] [56] The antisense oligomer of any one of paragraphs [43]-[55], wherein the antisense oligomer consists of from 8 to 50 nucleobases, 8 to 40 nucleobases, 8 to 35 nucleobases, 8 to 30 nucleobases, 8 to 25 nucleobases, 8 to 20 nucleobases, 8 to 15 nucleobases, 10 to 50 nucleobases, 10 to 40 nucleobases, 10 to 35 nucleobases, 10 to 30 nucleobases, 10 to 25 nucleobases, 10 to 20 nucleobases, 10 to 15 nucleobases, 12 to 50 nucleobases, 12 to 40 nucleobases, 12 to 35 nucleobases, 12 to 30 nucleobases, 12 to 25 nucleobases, 12 to 20 nucleobases, 12 to 15 nucleobases, 15 to 50 nucleobases, 15 to 40 nucleobases, 15 to 35 nucleobases, 15 to 30 nucleobases, 15 to 25 nucleobases, 15 to 20 nucleobases, 15 to 19 nucleobases, 15 to 18 nucleobases, 15 to 16 nucleobases, 16 to 20 nucleobases, 16 to 19 nucleobases, 16 to 18 nucleobases, 17 to 20 nucleobases, 17 to 19 nucleobases, or 18 to 20 nucleobases.

[0549] [57] The antisense oligomer of any one of paragraphs [43]-[56], wherein the antisense oligomer comprises a sequence with at least 90% identity to the sequence set forth in any one of SEQ ID NO: 1-92.

[0550] [58] The antisense oligomer of any one of paragraphs [43]-[56], wherein the antisense oligomer comprises a sequence with 100% identity to the sequence set forth in any one of SEQ ID NO: 1-92.

[0551] [59] The antisense oligomer of any one of paragraphs [43]-[56], wherein the antisense oligomer consists of a sequence with at least 80% identity to the sequence set forth in any one of SEQ ID NO: 1-92.

[0552] [60] The antisense oligomer of any one of paragraphs [43]-[56], wherein the antisense oligomer consists of a sequence with at least 90% identity to the sequence set forth in any one of SEQ ID NO: 1-92.

[0553] [61] The antisense oligomer of any one of paragraphs [43]-[56], wherein the antisense oligomer consists of a sequence with 100% identity to the sequence set forth in any one of SEQ ID NO: 1-92.

[0554] [62] The antisense oligomer of any one of paragraphs [43]-[56], wherein the antisense oligomer is a modified oligonucleotide comprising the sequence set forth in any one of SEQ ID NO: 154-189 or 192-247.

[0555] [63] The antisense oligomer of any one of paragraphs [43]-[56], wherein the antisense oligomer is a modified oligonucleotide consisting of the sequence set forth in any one of SEQ ID NO: 154-189 or 192-247.

[0556] [64] The antisense oligomer of any one of paragraphs [43]-[63], wherein the antisense oligomer is configured to reduce a level of a processed mRNA transcript encoding a UBE3A protein in a population of mammalian cells upon contact with the population.

[0557] [65] The antisense oligomer of paragraph [64], wherein the antisense oligomer is configured to reduce the level of the processed mRNA encoding the UBE3A protein in the population by about 10% to about 99%, about 10% to about 95%, about 10% to about 90%, about 10% to about 80%, about 10% to about 70%, about 10% to about 60%, about 10% to about 50%, about 10% to about 40%, about 10% to about 30%, about 10% to about 20%, about 20% to about 90%, about 20% to about 80%, about 20% to about 70%, about 20% to about 60%, about 20% to about 50%, about 20% to about 40%, about 20% to about 30%, about 30% to about 80%, about 30% to about 70%, about 30% to about 60%, about 30% to about 50%, about 40% to about 70%, about 40% to about 60%, about 40% to about 50%, about 50% to about 99%, about 50% to about 95%, about 50% to about 90%, about 50% to about 80%, about 50% to about 70%, about 50% to about 60%, about 60% to about 99%, about 60% to about 95%, about 60% to about 90%, about 60% to about 80%, about 60% to about 70%, about 70% to about 99%, about 70% to about 95%, about 70% to about 90%, about 70% to about 80%, about 80% to about 99%, about 80% to about 95%, about 80% to about 90%, about 90% to about 99%, about 90% to about 95%, or about 95% to about 99%, as compared to an otherwise same population of mammalian cells not contacted with the antisense oligomer.

[0558] [66] The antisense oligomer of paragraph [64], wherein the antisense oligomer is configured to reduce the level of the processed mRNA encoding the UBE3A protein in the population by at least about 10%, at least about 15%, at least about 20%, at least about 25%, at least about 30%, at least about 35%, at least about 40%, at least about 45%, at least about 50%, at least about 55%, at least about 60%, at least about 65%, at least about 70%, at least about 75%, at least about 80%, at least about 85%, at least about 90%, at least about 95%, or at least about 99%, as compared to an otherwise same population of mammalian cells not contacted with the antisense oligomer.

[0559] [67] The antisense oligomer of any one of paragraphs [64]-[66], wherein the antisense oligomer is configured to reduce the level of the processed mRNA encoding the UBE3A protein in the population by at most about 75%, at most about 70%, at most about 60%, at most about 50%, at most about 40%, at most about 30%, or at most about 20%, as compared to an otherwise same population of mammalian cells not contacted with the antisense oligomer.

[0560] [68] The antisense oligomer of any one of paragraphs [64]-[67], wherein the antisense oligomer is configured to reduce a level of the UBE3A protein in the population of mammalian cells.

[0561] [69] The antisense oligomer of paragraph [68], wherein the antisense oligomer is configured to reduce the level of the UBE3A protein in the population by about 10% to about 99%, about 10% to about 95%, about 10% to about 90%, about 10% to about 80%, about 10% to about 70%, about 10% to about 60%, about 10% to about 50%, about 10% to about 40%, about 10% to about 30%, about 10% to about 20%, about 20% to about 90%, about 20% to about 80%, about 20% to about 70%, about 20% to about 60%, about 20% to about 50%, about 20% to about 40%, about 20% to about 30%, about 30% to about 80%, about 30% to about 70%, about 30% to about 60%, about 30% to about 50%, about 40% to about 70%, about 40% to about 60%, about 40% to about 50%, about 50% to about 99%, about 50% to about 95%, about 50% to about 90%, about 50% to about 80%, about 50% to about 70%, about 50% to about 60%, about 60% to about 99%, about 60% to about 95%, about 60% to about 90%, about 60% to about 80%, about 60% to about 70%, about 70% to about 99%, about 70% to about 95%, about 70% to about 90%, about 70% to about 80%, about 80% to about 99%, about 80% to about 95%, about 80% to about 90%, about 90% to about 99%, about 90% to about 95%, or about 95% to about 99%, as compared to an otherwise same population of mammalian cells not contacted with the antisense oligomer.

[0562] [70] The antisense oligomer of paragraph [68], wherein the antisense oligomer is configured to reduce the level of the UBE3A protein in the population by at least about 10%, at least about 15%, at least about 20%, at least about 25%, at least about 30%, at least about 35%, at least about 40%, at least about 45%, at least about 50%, at least about 55%, at least about 60%, at least about 65%, at least about 70%, at least about 75%, at least about 80%, at least about 85%, at least about 90%, at least about 95%, or at least about 99%, as compared to an otherwise same population of mammalian cells not contacted with the antisense oligomer.

[0563] [71] The antisense oligomer of any one of paragraphs [64]-[70], wherein the antisense oligomer is configured to reduce the level of the UBE3A protein in the population by at most about 75%, at most about 70%, at most about 60%, at most about 50%, at most about 40%, at most about 30%, or at most about 20%, as compared to an otherwise same population of mammalian cells not contacted with the antisense oligomer.

[0564] [72] The antisense oligomer of any one of paragraphs [64]-[71], wherein the mammalian cell is ex vivo.

[0565] [73] The antisense oligomer of any one of paragraphs [64]-[71], wherein the mammalian cell is in vivo.

[0566] [74] The antisense oligomer of any one of paragraphs [64]-[73], wherein genome of the mammalian cell has a duplication of a genomic region that encompasses the UBE3A gene encoding the UBE3A protein.

[0567] [75] The antisense oligomer of any one of paragraphs [64]-[74], wherein the mammalian cell is a human cell.

[0568] [76] The antisense oligomer of paragraph [75], wherein genome of the mammalian cell has a duplication of chromosome 15q11.2-q13.1.

[0569] [77] The antisense oligomer of any one of paragraphs [64]-[76], wherein the mammalian cell is obtained from a human subject suffering from Dupl5q syndrome, or a progeny of a sample cell obtained from the human subject.

[0570] [78]A pharmaceutical composition, comprising:
[0571] (a) a pharmaceutically acceptable excipient or carrier; and
[0572] (b) the antisense oligomer of any one of paragraphs [43]-[77].

[0573] [79]A pharmaceutical composition, comprising:
[0574] (a) a pharmaceutically acceptable excipient or carrier; and
[0575] (b) an agent or a vector encoding the agent, wherein the agent is configured to reduce a level of a processed mRNA transcript encoding a UBE3A protein in a mammalian cell upon contact with the mammalian cell.

[0576] [80] The pharmaceutical composition of paragraph [79], wherein the agent comprises a polynucleotide sequence that is at least 80% complementary to at least 8 contiguous nucleic acids of the sequence set forth in any one of SEQ ID NO: 93-120.

[0577] [81] The pharmaceutical composition of paragraph [79], wherein the agent comprises a polynucleotide sequence that is at least 80% complementary to at least 8 contiguous nucleic acids of each mRNA transcript listed in Table 2.

[0578] [82] The pharmaceutical composition of any one of paragraphs [79]-[81], wherein the agent comprises an antisense oligomer.

[0579] [83] The pharmaceutical composition of paragraph [82], wherein the antisense oligomer has at least 80% identity to the sequence set forth in any one of SEQ ID NO: 1-92.

[0580] [84] The pharmaceutical composition of any one of paragraphs [79]-[83], comprising the vector, and wherein the vector comprises a viral vector encoding the agent.

[0581] [85] The pharmaceutical composition of paragraph [84], wherein the viral vector comprises an adenoviral vector, adeno-associated viral (AAV) vector, lentiviral vector, Herpes Simplex Virus (HSV) viral vector, or retroviral vector.

[0582] [86] The pharmaceutical composition of any one of paragraphs [82]-[85], wherein the antisense oligomer comprises a sequence with at least 90% identity to the sequence set forth in any one of SEQ ID NO: 1-92.

[0583] [87] The pharmaceutical composition of any one of paragraphs [82]-[85], wherein the antisense oligomer comprises a sequence with 100% identity to the sequence set forth in any one of SEQ ID NO: 1-92.

[0584] [88] The pharmaceutical composition of any one of paragraphs [82]-[85], wherein the antisense oligomer consists of a sequence with at least 80% identity to the sequence set forth in any one of SEQ ID NO: 1-92.

[0585] [89] The pharmaceutical composition of any one of paragraphs [82]-[85], wherein the antisense oligomer consists of a sequence with at least 90% identity to the sequence set forth in any one of SEQ ID NO: 1-92.

[0586] [90] The pharmaceutical composition of any one of paragraphs [82]-[85], wherein the antisense oligomer consists of a sequence with 100% identity to the sequence set forth in any one of SEQ ID NO: 1-92.

[0587] [91] The pharmaceutical composition of paragraph [82], wherein the antisense oligomer is a modified oligonucleotide comprising the sequence set forth in any one of SEQ ID NO: 154-189 or 192-247.

[0588] [92] The pharmaceutical composition of paragraph [82], wherein the antisense oligomer is a modified oligonucleotide consisting of the sequence set forth in any one of SEQ ID NO: 154-189 or 192-247.

[0589] [93] The pharmaceutical composition of any one of paragraphs [79]-[92], wherein the agent is configured to reduce the level of the processed mRNA encoding the UBE3A protein in the population of the mammalian cells upon contact with the population.

[0590] [94] The pharmaceutical composition of paragraph [93], wherein the antisense oligomer is configured to reduce the level of the processed mRNA encoding the UBE3A protein in the population by about 10% to about 99%, about 10% to about 95%, about 10% to about 90%, about 10% to about 80%, about 10% to about 70%, about 10% to about 60%, about 10% to about 50%, about 10% to about 40%, about 10% to about 30%, about 10% to about 20%, about 20% to about 90%, about 20% to about 80%, about 20% to about 70%, about 20% to about 60%, about 20% to about 50%, about 20% to about 40%, about 20% to about 30%, about 30% to about 80%, about 30% to about 70%, about 30% to about 60%, about 30% to about 50%, about 40% to about 70%, about 40% to about 60%, about 40% to about 50%, about 50% to about 99%, about 50% to about 95%, about 50% to about 90%, about 50% to about 80%, about 50% to about 70%, about 50% to about 60%, about 60% to about 99%, about 60% to about 95%, about 60% to about 90%, about 60% to about 80%, about 60% to about 70%, about 70% to about 99%, about 70% to about 95%, about 70% to about 90%, about 70% to about 80%, about 80% to about 99%, about 80% to about 95%, about 80% to about 90%, about 90% to about 99%, about 90% to about 95%, or about 95% to about 99%, as compared to an otherwise same population of mammalian cells not contacted with the agent or the vector.

[0591] [95] The pharmaceutical composition of paragraph [93], wherein the agent is configured to reduce the level of the processed mRNA encoding the UBE3A protein in the population by at least about 10%, at least about 15%, at least about 20%, at least about 25%, at least about 30%, at least about 35%, at least about 40%, at least about 45%, at least about 50%, at least about 55%, at least about 60%, at least about 65%, at least about 70%, at least about 75%, at least about 80%, at least about 85%, at least about 90%, at least about 95%, or at least about 99%, as compared to an otherwise same population of mammalian cells not contacted with the agent or the vector.

[0592] [96] The pharmaceutical composition of any one of paragraphs paragraph [93]-[95], wherein the agent is configured to reduce the level of the processed mRNA encoding the UBE3A protein in the population by at most about 75%, at most about 70%, at most about 60%, at most about 50%, at most about 40%, at most about 30%, or at most about 20%, as compared to an otherwise same population of mammalian cells not contacted with the antisense oligomer.

[0593] [97] The pharmaceutical composition of any one of paragraphs paragraph [93]-[96], wherein the agent is configured to reduce a level of the UBE3A protein in the population.

[0594] [98] The pharmaceutical composition of paragraph [97], wherein the agent is configured to reduce the level of the UBE3A protein in the population by about 10% to about 99%, about 10% to about 95%, about 10% to about 90%, about 10% to about 80%, about 10% to about 70%, about 10% to about 60%, about 10% to about 50%, about 10% to about 40%, about 10% to about 30%, about 10% to about 20%, about 20% to about 90%, about 20% to about 80%, about 20% to about 70%, about 20% to about 60%, about 20% to about 50%, about 20% to about 40%, about 20% to about 30%, about 30% to about 80%, about 30% to about 70%, about 30% to about 60%, about 30% to about 50%, about 40% to about 70%, about 40% to about 60%, about 40% to about 50%, about 50% to about 99%, about 50% to about 95%, about 50% to about 90%, about 50% to about 80%, about 50% to about 70%, about 50% to about 60%, about 60% to about 99%, about 60% to about 95%, about 60% to about 90%, about 60% to about 80%, about 60% to about 70%, about 70% to about 99%, about 70% to about 95%, about 70% to about 90%, about 70% to about 80%, about 80% to about 99%, about 80% to about 95%, about 80% to about 90%, about 90% to about 99%, about 90% to about 95%, or about 95% to about 99%, as compared to an otherwise same population of mammalian cells not contacted with the agent or the vector.

[0595] [99] The pharmaceutical composition of paragraph [97], wherein the agent is configured to reduce the level of the UBE3A protein in the population by at least about 10%, at least about 15%, at least about 20%, at least about 25%, at least about 30%, at least about 35%, at least about 40%, at least about 45%, at least about 50%, at least about 55%, at least about 60%, at least about 65%, at least about 70%, at least about 75%, at least about 80%, at least about 85%, at least about 90%, at least about 95%, or at least about 99%, as compared to an otherwise same population of mammalian cells not contacted with the agent or the vector.

[0596] [100] The pharmaceutical composition of any one of paragraphs [97]-[99], wherein the agent is configured to reduce the level of the UBE3A protein in the population by at most about 75%, at most about 70%, at most about 60%, at most about 50%, at most about 40%, at most about 30%, or at most about 20%, as compared to an otherwise same population of mammalian cells not contacted with the antisense oligomer.

[0597] [101] The pharmaceutical composition of any one of paragraphs [79]-[100], wherein the mammalian cell is ex vivo.

[0598] [102] The pharmaceutical composition of any one of paragraphs [79]-[100], wherein the mammalian cell is in vivo.

[0599] [103] The pharmaceutical composition of any one of paragraphs [79]-[102], wherein genome of the mammalian cell has a duplication of a genomic region that encompasses the UBE3A gene encoding the UBE3A protein.

[0600] [104] The pharmaceutical composition of any one of paragraphs [79]-[103], wherein the mammalian cell is a human cell.

[0601] [105] The pharmaceutical composition of paragraph [104], wherein genome of the mammalian cell has a duplication of chromosome 15q11.2-q13.1.

[0602] [106] The pharmaceutical composition of any one of paragraphs [79]-[99], wherein the mammalian cell is obtained from a human subject suffering from Dup15q syndrome, or a progeny of a sample cell obtained from the human subject.

[0603] [107] The pharmaceutical composition of any one of paragraphs [78]-[106], wherein the pharmaceutical composition is formulated for intracerebroventricular injection, intraperitoneal injection, intramuscular injection, intrathecal injection, intra cisterna magna injection, subcutaneous injection, oral administration, synovial injection, intravitreal administration, subretinal injection, topical application, implantation, or intravenous injection.

[0604] [108] The pharmaceutical composition of any one of paragraphs [78]-[106], wherein the pharmaceutical composition is formulated for intrathecal injection.

[0605] [109] The pharmaceutical composition of any one of paragraphs [78]-[108], wherein the pharmaceutically acceptable excipient or carrier comprises artificial cerebrospinal fluid.

[0606] [110] The pharmaceutical composition of any one of paragraphs [78]-[109], wherein the pharmaceutical composition further comprises a second therapeutic agent.

[0607] [111] The pharmaceutical composition of paragraph [110], wherein the second therapeutic agent comprises a small molecule, an antisense oligomer, or a gene editing molecule.

[0608] [112]A method of treating or reducing the likelihood of developing a disease or condition in a subject in need thereof by reducing expression of a UBE3A protein in cells of the subject, comprising contacting to the cells of the subject the pharmaceutical composition of any one of paragraphs [78]-[111].

[0609] [113] The method of paragraph [112], wherein the disease or condition is associated with overexpression or gain-of-function mutation in a UBE3A gene encoding the UBE3A protein.

[0610] [114] The method of paragraph [112] or [113], wherein genomes of the cells of the subject have at least one excessive copy of a UBE3A gene encoding the UBE3A protein.

[0611] [115] The method of paragraph [112] or [114], wherein genomes of the cells of the subject have a duplication of a genomic region encompassing a UBE3A gene encoding the UBE3A protein.

[0612] [116] The method of paragraph [112] or [115], wherein genomes of the cells of the subject have a duplication of chromosome 15ql1.2-q13.1.

[0613] [117] The method of any one of paragraphs [112]-[116], wherein the disease or condition comprises Dup15q syndrome, autism spectrum disorder, epilepsy, or intellectual disability.

[0614] [118] The method of any one of paragraphs [112]-[117], wherein the subject is a human.

[0615] [119] The method of any one of paragraphs [112]-[118], wherein the subject is a fetus, an embryo, or a child.

[0616] [120] The method of any one of paragraphs [112]-[119], wherein the cells are ex vivo.

[0617] [121] The method of any one of paragraphs [112]-[119], comprising administering the pharmaceutical composition to the subject by intracerebroventricular injection, intraperitoneal injection, intramuscular injection, intrathecal injection, intra cisterna magna injection, subcutaneous injection, oral administration, synovial injection, intravitreal administration, subretinal injection, topical application, implantation, or intravenous injection.

[0618] [122] The method of any one of paragraphs [112]-[119], comprising administering the pharmaceutical composition to the subject by intrathecal injection.

[0619] [123] The method of any one of paragraphs [112]-[122], wherein the method treats the disease or condition.

### EXAMPLES

[0620] The present disclosure will be more specifically illustrated by the following Examples.

[0621] However, it should be understood that the present disclosure is not limited by these examples in any manner.

### Example 1: Knockdown of UBE3A Gene in Human Cells

[0622] In one experiment, effects on human UBE3A mRNA transcripts of compound molecules according to some embodiments of the present disclosure were examined. The compound molecules are modified oligonucleotides listed in Table 3. Among the examined compound molecules, there were 22 test oligonucleotides according to some embodiments of the present disclosure, one no template control (NTC) that serves as a negative control (“Ncontrol”), and one positive control oligonucleotide that is known for its knockdown effect on UBE3A gene (“Pcontrol”). As shown in the table, “/52MOErX/” represents a 2-O-methyoxyethyl modified ribonucleoside X at 5′ end of an oligonucleotide, where X is A, T, G, or methylated cytosine (MeC); “/i2MOErX/” represents an internal 2-O-methyoxyethyl modified ribonucleoside X, where X is A, T, G, or MeC); “/32MOErX/” represents a 2-O-methyoxyethyl modified ribonucleoside X at 3′ end of an oligonucleotide, where X is A, T, G, or MeC; other nucleosides A, T, G, and C are deoxyribonucleosides; “*” represents phosphorothioate linkage between two neighboring nucleosides.

TABLE 3
List of Compound Molecules

| Compound ID | Compound Sequence | SEQ ID NO. |
|---|---|---|
| Compound_1 | /52MOErC/*/i2MOErG/*/i2MOErC/*/i2MOErT/*/i2MO | 154 |
| | ErT/*C*A*T*T*C*G*G*C*T*A*/i2MOErG/*/i2MOErC/* | |
| | /i2MOErT/*/i2MOErT/*/32MOErC/ | |
| Compound_2 | /52MOErA/*/i2MOErT/*/i2MOErT/*/i2MOErC/*/i2MO | 155 |
| | ErG/*G*C*T*A*G*C*T*T*C*A*/i2MOErA/*/i2MOErT/* | |
| | /i2MOErG/*/i2MOErT/*/32MOErC/ | |
| Compound_3 | /52MOErT/*/i2MOErC/*/i2MOErG/*/i2MOErC/*/i2MO | 156 |
| | ErT/*T*C*A*T*T*C*G*G*C*T*/i2MOErA/*/i2MOErG/* | |
| | /i2MOErC/*/i2MOErT/*/32MOErT/ | |
| Compound_4 | /52MOErG/*/i2MOErC/*/i2MOErT/*/i2MOErT/*/i2MO | 157 |
| | ErC/*A*T*T*C*G*G*C*T*A*G*/i2MOErC/*/i2MOErT/* | |
| | /i2MOErT/*/i2MOErC/*/32MOErA/ | |
| Compound_5 | /52MOErT/*/i2MOErC/*/i2MOErG/*G*C*T*A*G*C*T*T | 158 |
| | *C*A*/i2MOErA/*/i2MOErT/*/i2MOErG/*/32MOErT/ | |
| Compound_6 | /52MOErC/*/i2MOErA/*/i2MOErT/*/i2MOErT/*/i2MO | 159 |
| | ErC/*G*G*C*T*A*G*C*T*T*C*/i2MOErA/*/i2MOErA/* | |
| | /i2MOErT/*/i2MOErG/*/32MOErT/ | |
| Compound_7 | /52MOErT/*/i2MOErC/*/i2MOErG/*/i2MOErG/*C*T*A | 160 |
| | *G*C*T*T*C*A*A*/i2MOErT/*/i2MOErG/*/i2MOErT/* | |
| | /32MOErC/ | |
| Compound_8 | /52MOErC/*/i2MOErC/*/i2MOErG/*/i2MOErG/*/i2MO | 161 |
| | ErA/*C*A*A*G*T*G*C*A*T*C*/i2MOErA/*/i2MOErT/* | |
| | /i2MOErC/*/i2MOErT/*/32MOErA/ | |
| Compound_9 | /52MOErC/*/i2MOErC/*/i2MOErG/*/i2MOErG/*A*C*A | 162 |
| | *A*G*T*G*C*A*T*/i2MOErC/*/i2MOErA/*/i2MOErT/* | |
| | /i2MOErC/*/32MOErT/ | |
| Compound_10 | /52MOErT/*/i2MOErC/*/i2MOErA/*/i2MOErC/*/i2MO | 163 |
| | ErA/*T*T*C*C*A*C*G*T*T*A*/i2MOErG/*/i2MOErG/* | |
| | /i2MOErT/*/i2MOErG/*/32MOErA/ | |
| Compound_11 | /52MOErC/*/i2MOErT/*/i2MOErT/*/i2MOErC/*T*G*G | 164 |
| | *T*C*T*G*A*A*T*/i2MOErA/*/i2MOErA/*/i2MOErG/* | |
| | /i2MOErT/*/32MOErA/ | |
| Compound_12 | /52MOErC/*/i2MOErG/*/i2MOErG/*/i2MOErA/*/i2MO | 165 |
| | ErC/*A*A*G*T*G*C*A*T*C*A*/i2MOErT/*/i2MOErC/* | |
| | /i2MOErT/*/i2MOErA/*/32MOErT/ | |
| Compound_13 | /52MOErT/*/i2MOErG/*/i2MOErT/*/i2MOErA/*/i2MO | 166 |
| | ErC/*A*T*G*C*G*A*A*T*T*C*/i2MOErT/*/i2MOErA/* | |
| | /i2MOErT/*/i2MOErT/*/32MOErG/ | |
| Compound_14 | /52MOErT/*/i2MOErC/*/i2MOErC/*/i2MOErA/*/i2MO | 167 |
| | ErT/*A*G*C*G*A*T*C*A*T*C*/i2MOET/*/i2MOErC/* | |
| | /i2MOET/*/i2MOErA/*/32MOErG/ | |
| Compound_15 | /52MOErT/*/i2MOErT/*/i2MOErC/*/i2MOErC/*/i2MO | 168 |
| | ErG/*G*C*T*T*C*C*A*C*A*T*/i2MOErA/*/i2MOErT/* | |
| | /i2MOErA/*/i2MOErA/*/32MOErG/ | |
| Compound_16 | /52MOErC/*/i2MOErA/*/i2MOErT/*/i2MOErT/*C*T*C | 169 |
| | *C*G*A*A*T*C*T*/i2MOErG/*/i2MOErG/*/i2MOErT/* | |
| | /32MOErC/ | |
| Compound_17 | /52MOErC/*/i2MOErC/*/i2MOErT/*/i2MOErT/*/i2MO | 170 |
| | ErC/*C*T*G*T*T*T*T*C*A*T*/i2MOErT/*/i2MOErT/* | |
| | /i2MOErG/*/i2MOErT/*/32MOErA/ | |
| Compound_18 | /52MOErC/*/i2MOErC/*/i2MOErT/*/i2MOErT/*/i2MO | 171 |
| | ErT/*C*T*G*T*G*T*C*T*G*G*/i2MOErG/*/i2MOErC/* | |
| | /i2MOErC/*/i2MOErA/*/32MOErT/ | |
| Compound_19 | /52MOErC/*/i2MOErT/*/i2MOErC/*/i2MOErT/*/i2MO | 172 |
| | ErT/*A*C*A*G*A*T*T*T*T*T*/i2MOErA/*/i2MOErA/* | |
| | /i2MOErC/*/i2MOErC/*/32MOErT/ | |
| Compound_20 | /52MOErT/*/i2MOErA/*/i2MOErG/*/i2MOErG/*/i2MO | 173 |
| | ErT/*A*A*C*C*T*T*T*C*T*G*/i2MOErT/*/i2MOErG/* | |
| | /i2MOErT/*/i2MOErC/*/32MOErT/ | |
| Compound_21 | /52MOErG/*/i2MOErT/*/i2MOErG/*/i2MOErA/*/i2MO | 174 |
| | ErA/*C*A*T*A*C*C*A*A*T*A*/i2MOErT/*/i2MOErC/* | |
| | /i2MOErT/*/i2MOErG/*/32MOErG/ | |
| Compound_22 | /52MOErG/*/i2MOErT/*/i2MOErA/*/i2MOErT/*G*A*G | 175 |
| | *A*T*G*T*A*G*G*/i2MOErT/*/i2MOErA/*/i2MOErA/* | |
| | /i2MOErC/*/32MOErC/ | |
| Compound_23 | /52MOErA/*/i2MOErC/*/i2MOErA/* | 176 |
| | /i2MOErG/*/i2MOErG/*T* T*G*T* C*A*C* A*C*C* | |
| | /i2MOErA/*/i2MOErG/*/i2MOErT/* | |
| | /i2MOErC/*/32MOErT/ | |
| Compound_24 | /52MOErA/*/i2MOErG/*/i2MOErT/*/i2MOErA/*/i2MO | 177 |
| | ErT/*G*A*G*A*T*G*T*A*G*G*/i2MOErT/*/i2MOErA/* | |
| | /i2MOErA/*/i2MOErC/*/32MOErC/ | |
| Compound_25 | /52MOErA/*/i2MOErG/*/i2MOErC/* | 178 |
| | /i2MOErT/*/i2MOErG/*T* G*G*C* C*A*T* T*C*G* | |
| | /i2MOErG/*/i2MOErT/*/i2MOErG/* | |
| | /i2MOErA/*/32MOErC/ | |
| Compound_26 | /52MOErC/*/i2MOErA/*/i2MOErA/*/i2MOErG/*T*A* | 179 |
| | T*G*A* G*A*T* G*T*/i2MOErA/* | |
| | /i2MOErG/*/i2MOErG/*/i2MOErT/*/32MOErA/ | |
| Compound_27 | /52MOErG/*/i2MOErA/*/i2MOErT/* | 180 |
| | /i2MOErA/*/i2MOErA/*G* T*G*G* T*T*T* T*C*G* | |
| | /i2MOErA/*/i2MOErC/*/i2MOErA/* | |
| | /i2MOErA/*/32MOErT/ | |
| Compound_28 | /52MOErC/*/i2MOErG/*/i2MOErG/* | 181 |
| | /i2MOErA/*/i2MOErC/*A* A*G*T* G*C*A* T*C*A* | |
| | /i2MOErT/*/i2MOErC/*/i2MOErT/* | |
| | /i2MOErA/*/32MOErT/ | |
| Compound_29 | /52MOErC/*/i2MOErC/*/i2MOErG/*/i2MOErG/*A*C* | 182 |
| | A*A*G* T*G*C* A*T*/i2MOErC/* | |
| | /i2MOErA/*/i2MOErT/*/i2MOErC/*/32MOErT/ | |
| Compound_30 | /52MOErG/*/i2MOErT/*/i2MOErA/*/i2MOErA/*C*A*C | 183 |
| | *T*T*T*C*A*C*G*/i2MOErC/*/i2MOErA/*/i2MOErA/* | |
| | /i2MOErA/*/32MOErA/ | |
| Compound_31 | /52MOErC/*/i2MOErA/*/i2MOErT/*/i2MOErT/*C*T* | 184 |
| | C*C*G* A*A*T* C*T*/i2MOErG/* /i2MOErG/ | |
| | */i2MOErT/*/32MOErC/ | |
| Compound_32 | /52MOErG/*/i2MOErG/*/i2MOErA/*/i2MOErC/*A*A* | 185 |
| | G*T*G* C*A*T* C*A*/i2MOErT/* | |
| | /i2MOErC/*/i2MOErT/*/i2MOErA/*/32MOErT/ | |
| Compound_33 | /52MOErT/*/i2MOErC/*/i2MOErC/* | 186 |
| | /i2MOErA/*/i2MOErT/*A* G*C*G* A*T*C* A*T*C* | |
| | /i2MOErT/*/i2MOErC/*/i2MOErT/* | |
| | /i2MOErA/*/32MOErG/ | |
| Compound_34 | /52MOErA/*/i2MOErA/*/i2MOErG/*/i2MOErC/*T*G* | 187 |
| | T*G*G* C*C*A* T*T*/i2MOErC/* | |
| | /i2MOErG/*/i2MOErG/*/32MOErT/ | |
| Compound_35 | /52MOErC/*/i2MOErC/*/i2MOErT/* | 188 |
| | /i2MOErT/*/i2MOErT/*C* T*G*T* G*T*C* T*G*G* | |
| | /i2MOErG/*/i2MOErC/*/i2MOErC/* | |
| | /i2MOErA/*/32MOErT/ | |
| Compound_36 | /52MOErC/*/i2MOErC/*/i2MOErT/* | 189 |
| | /i2MOErT/*/i2MOErC/*C* T*G*T* T*T*T* C*A*T* | |
| | /i2MOErT/*/i2MOErT/*/i2MOErG/* | |
| | /i2MOErT/*/32MOErA/ | |
| Ncontrol | /52MOErA/*/i2MOErT/*/i2MOErC/*/i2MOErA/*/i2MO | 190 |
| | ErG/*T*T*G*C*C*G*T*G*T*C*/i2MOErT/*/i2MOErT/* | |
| | /i2MOErT/*/i2MOErC/*/32MOErT/ | |
| Pcontrol | /52MOErT/*/i2MOErG/*/i2MOErA/*/i2MOErG/*/i2MO | 191 |
| | ErC/*T*A*T*C*A*C*C*T*A*T*/i2MOErC/*/i2MOErC/* | |
| | /i2MOErT/*/i2MOErT/*/32MOErG/ | |

TABLE 4
List of Compound Molecules

| Compound ID | Compound Sequences | SEQ ID NO. |
|---|---|---|
| Compound_37 | /52MOErA/*/i2MOErC/*/i2MOErA/* | 192 |
| | /i2MOErT/*/i2MOErT/*C* G*G*C* T*A*G* C*T*T* | |
| | /i2MOErC/*/i2MOErA/*/i2MOErA/* | |
| | /i2MOErT/*/32MOErG/ | |
| Compound_38 | /52MOErT/*/i2MOErT/*/i2MOErC/*/i2MOErG/*G*C* | 193 |
| | T*A*G* C*T*T* C*A*/i2MOErA/* | |
| | /i2MOErT/*/i2MOErG/*/i2MOErT/*/32MOErC/ | |
| Compound_39 | /52MOErT/*/i2MOErT/*/i2MOErC/*/i2MOErG/*G*C* | 194 |
| | T*A*G* C*T*T* C*A*/i2MOErA/* | |
| | /i2MOErG/*/i2MOErG/*/32MOErT/ | |
| Compound_40 | /52MOErC/*/i2MOErT/*/i2MOErT/*/i2MOErA/*C*A* | 195 |
| | T*T*C* G*G*C* T*A*/i2MOErG/* | |
| | /i2MOErC/*/i2MOErT/*/i2MOErT/*/32MOErC/ | |
| Compound_41 | /52MOErC/*/i2MOErT/*/i2MOErT/*/i2MOErA/*C*A* | 196 |
| | T*T*C* G*G*C* T*A*/i2MOErG/* | |
| | /i2MOErC/*/i2MOErT/*/32MOErT/ | |
| Compound_42 | /52MOErA/*/i2MOErT/*/i2MOErT/*/i2MOErC/*G*G* | 197 |
| | C*T*A* G*C*T* T*C*/i2MOErA/* | |
| | /i2MOErA/*/i2MOErT/*/i2MOErG/*/32MOErT/ | |
| Compound_43 | /52MOErT/*/i2MOErA/*/i2MOErC/*/i2MOErC/*A*T* | 198 |
| | A*T*T* T*C*G* C*C*/i2MOErA/* | |
| | /i2MOErA/*/i2MOErA/*/i2MOErC/*/32MOErT/ | |
| Compound_44 | /52MOErA/*/i2MOErC/*/i2MOErC/* | 199 |
| | /i2MOErT/*/i2MOErT/*T* C*T*G* T*G*T* C*T*G* | |
| | /i2MOErG/*/i2MOErG/*/i2MOErC/* | |
| | /i2MOErC/*/32MOErA/ | |
| Compound_45 | /52MOErT/*/i2MOErC/*/i2MOErA/*/i2MOErC/*A*T* | 200 |
| | T*C*C* A*C*G* T*T*/i2MOErA/* | |
| | /i2MOErG/*/i2MOErG/*/i2MOErT/*/32MOErG/ | |
| Compound_46 | /52MOErC/*/i2MOErG/*/i2MOErT/* | 201 |
| | /i2MOErG/*/i2MOErT/*C* T*T*T* C*T*G* T*G*T* | |
| | /i2MOErC/*/i2MOErT/*/i2MOErG/* | |
| | /i2MOErG/*/32MOErG/ | |
| Compound_47 | /52MOErC/*/i2MOErT/*/i2MOErT/* A*C*A* T*T*C* | 202 |
| | G*G*C* T*/i2MOErA/*/i2MOErG/* | |
| | /i2MOErC/*/32MOErT/ | |
| Compound_48 | /52MOErT/*/i2MOErG/*/i2MOErT/* | 203 |
| | /i2MOErC/*/i2MOErT/*T* T*C*T* G*T*G* T*C*T* | |
| | /i2MOErG/*/i2MOErG/*/i2MOErG/* | |
| | /i2MOErC/*/32MOErC/ | |
| Compound_49 | /52MOErC/*/i2MOErT/*/i2MOErT/* | 204 |
| | /i2MOErA/*/i2MOErC/*C* C*G*G* C*T*T* C*C*A* | |
| | /i2MOErC/*/i2MOErA/*/i2MOErT/* | |
| | /i2MOErA/*/32MOErT/ | |
| Compound_50 | /52MOErT/*/i2MOErT/*/i2MOErA/*/i2MOErC/*A*T* | 205 |
| | T*C*G* G*C*T* A*G*/i2MOErC/* | |
| | /i2MOET/*/i2MOErT/*/i2MOErC/*/32MOErA/ | |
| Compound_51 | /52MOErA/*/i2MOErC/*/i2MOErA/*/i2MOErT/*T*C* | 206 |
| | G*G*C* T*A*G* C*T*/i2MOErT/* | |
| | /i2MOErC/*/i2MOErA/*/i2MOErA/*/32MOErT/ | |
| Compound_52 | /52MOErT/*/i2MOErT/*/i2MOErT/* | 207 |
| | /i2MOErG/*/i2MOErT/*T* G*C*A* A*T*A* G*G*C* | |
| | /i2MOErT/*/i2MOErT/*/i2MOErG/* | |
| | /i2MOErA/*/32MOErC/ | |
| Compound_53 | /52MOErC/*/i2MOErA/*/i2MOErT/* | 208 |
| | /i2MOErA/*/i2MOErC/*C* A*T*A* T*T*T* C*G*C* | |
| | /i2MOErC/*/i2MOErA/*/i2MOErA/* | |
| | /i2MOErA/*/32MOErC/ | |
| Compound_54 | /52MOErC/*/i2MOErT/*/i2MOErT/* | 209 |
| | /i2MOErA/*/i2MOErC/*A* T*T*C* G*G*C* T*A*G* | |
| | /i2MOErC/*/i2MOErT/*/i2MOErT/* | |
| | /i2MOErC/*/32MOErA/ | |
| Compound_55 | /52MOErT/*/i2MOErC/*/i2MOErA/*/i2MOErC/*A*T* | 210 |
| | T*C*C* A*C*G* T*T*/i2MOErA/* | |
| | /i2MOErG/*/i2MOErG/*/32MOErT/ | |
| Compound_56 | /52MOErA/*/i2MOErT/*/i2MOErA/* | 211 |
| | /i2MOErC/*/i2MOErC/*A* T*A*T* T*T*C* G*C*C* | |
| | /i2MOErA/*/i2MOErA/*/i2MOErA/* | |
| | /i2MOErC/*/32MOErT/ | |
| Compound_57 | /52MOErC/*/i2MOErC/*/i2MOErG/* | 212 |
| | /i2MOErT/*/i2MOErG/*T* C*T*T* T*C*T* G*T*G* | |
| | /i2MOErT/*/i2MOErC/*/i2MOErT/* | |
| | /i2MOErG/*/32MOErG/ | |
| Compound_58 | /52MOErG/*/i2MOErT/*/i2MOErC/* | 213 |
| | /i2MOErT/*/i2MOErT/*T* C*T*G* T*G*T* C*T*G* | |
| | /i2MOErG/*/i2MOErG/*/i2MOErC/* | |
| | /i2MOErC/*/32MOErA/ | |
| Compound_59 | /52MOErA/*/i2MOErA/*/i2MOErC/* | 214 |
| | /i2MOErC/*/i2MOErT/*T* T*C*T* G*T*G* T*C*T* | |
| | /i2MOErG/*/i2MOErG/*/i2MOErG/* | |
| | /i2MOErC/*/32MOErC/ | |
| Compound_60 | /52MOErG/*/i2MOErT/*/i2MOErG/* | 215 |
| | /i2MOErT/*/i2MOErC/*T* T*T*C* T*G*T* G*T*C* | |
| | /i2MOErT/*/i2MOErG/*/i2MOErG/* | |
| | /i2MOErG/*/32MOErC/ | |
| Compound_61 | /52MOErG/*/i2MOErT/*/i2MOErA/* | 216 |
| | /i2MOErG/*/i2MOErG/*T* A*A*C* C*T*T* T*C*T* | |
| | /i2MOErG/*/i2MOErT/*/i2MOErG/* | |
| | /i2MOErT/*/32MOErC/ | |
| Compound_62 | /52MOErA/*/i2MOErC/*/i2MOErA/* | 217 |
| | /i2MOErT/*/i2MOErT/*C* C*A*C* G*T*T* A*G*G* | |
| | /i2MOErT/*/i2MOErG/*/i2MOErA/* | |
| | /i2MOErC/*/32MOErA/ | |
| Compound_63 | /52MOErG/*/i2MOErT/*/i2MOErT/*/i2MOErG/*C*A* | 218 |
| | A*T*A* G*G*C* T*T*/i2MOErG/* | |
| | /i2MOErA/*/i2MOErC/*/i2MOET/*/32MOErA/ | |
| Compound_64 | /52MOErC/*/i2MOErA/*/i2MOErG/*/i2MOErG/*T*T* | 219 |
| | G*T*C* A*C*A* C*C*/i2MOErA/* | |
| | /i2MOErG/*/i2MOErT/*/i2MOErC/*/32MOErT/ | |
| Compound_65 | /52MOErA/*/i2MOErC/*/i2MOErC/* | 220 |
| | /i2MOErA/*/i2MOErT/*A* T*T*T* C*G*C* C*A*A* | |
| | /i2MOErA/*/i2MOErC/*/i2MOErT/* | |
| | /i2MOErT/*/32MOErC/ | |
| Compound_66 | /52MOErC/*/i2MOErT/*/i2MOErT/* | 221 |
| | /i2MOErA/*/i2MOErC/*C* C*G*G* A*C*A* A*G*T* | |
| | /i2MOErG/*/i2MOErC/*/i2MOErA/* | |
| | /i2MOErT/*/32MOErC/ | |
| Compound_67 | /52MOErT/*/i2MOErT/*/i2MOErA/*/i2MOErC/*C*C* | 222 |
| | G*G*A* C*A*A* G*T*/i2MOErG/* | |
| | /i2MOErC/*/i2MOErA/*/i2MOErT/*/32MOErC/ | |
| Compound_68 | /52MOErG/*/i2MOErG/*/i2MOErC/*/i2MOErC/*A*T* | 223 |
| | T* C*G* G*T*G* A*C*/i2MOErA/* | |
| | /i2MOErT/*/i2MOErC/*/32MOErA/ | |
| Compound_69 | /52MOErT/*/i2MOErG/*/i2MOErA/* | 224 |
| | /i2MOErT/*/i2MOErC/*T* T*T*T* A*C*A* A*G*C* | |
| | /i2MOErT/*/i2MOErG/*/i2MOErT/* | |
| | /i2MOErG/*/32MOErG/ | |
| Compound_70 | /52MOErA/*/i2MOErG/*/i2MOErC/*/i2MOErA/*A*G* | 225 |
| | T*A*T* G*A*G* A*T*/i2MOErG/* | |
| | /i2MOErT/*/i2MOErA/*/i2MOErG/*/32MOErG/ | |
| Compound_71 | /52MOErA/*/i2MOErC/*/i2MOErC/*/i2MOErA/*T*A* | 226 |
| | T*T*T* C*G*C* C*A*/i2MOErA/* | |
| | /i2MOErA/*/i2MOErC/*/i2MOErT/*/32MOErT/ | |
| Compound_72 | /52MOErG/*/i2MOErG/*/i2MOErT/* | 227 |
| | /i2MOErA/*/i2MOErA/*C* C*T*T* T*C*T* G*T*G* | |
| | /i2MOErT/*/i2MOErC/*/i2MOErT/* | |
| | /i2MOErG/*/32MOErG/ | |
| Compound_73 | /52MOErA/*/i2MOErC/*/i2MOErA/*/i2MOErG/*G*T* | 228 |
| | T*G*T* C*A*C* A*C*/i2MOErC/* | |
| | /i2MOErA/*/i2MOErG/*/i2MOET/*/32MOErC/ | |
| Compound_74 | /52MOErG/*/i2MOErT/*/i2MOErT/*/i2MOErG/*C*A* | 229 |
| | A*T*A* G*G*C* T*T*/i2MOErG/* | |
| | /i2MOErA/*/i2MOErC/*/32MOErT/ | |
| Compound_75 | /52MOErT/*/i2MOErG/*/i2MOErT/* | 230 |
| | /i2MOErG/*/i2MOErA/*A* C*A*T* A*C*C* A*A*T* | |
| | /i2MOErA/*/i2MOErT/*/i2MOErC/* | |
| | /i2MOErT/*/32MOErG/ | |
| Compound_76 | /52MOErA/*/i2MOErC/*/i2MOErT/* | 231 |
| | /i2MOErG/*/i2MOErT/*A* C*A*T* G*C*G* A*A*T* | |
| | /i2MOErT/*/i2MOErC/*/i2MOErT/* | |
| | /i2MOErA/*/32MOErT/ | |
| Compound_77 | /52MOErT/*/i2MOErT/*/i2MOErA/* | 232 |
| | /i2MOErC/*/i2MOErC/*C* G*G*A* C*A*A* G*T*G* | |
| | /i2MOErC/*/i2MOErA/*/i2MOErT/* | |
| | /i2MOErC/*/32MOErA/ | |
| Compound_78 | /52MOErT/*/i2MOErG/*/i2MOErT/* | 233 |
| | /i2MOErA/*/i2MOErG/*G* T*A*A* C*C*T* T*T*C* | |
| | /i2MOErT/*/i2MOErG/*/i2MOErT/* | |
| | /i2MOErG/*/32MOErT/ | |
| Compound_79 | /52MOErT/*/i2MOErT/*/i2MOErT/* | 234 |
| | /i2MOErC/*/i2MOErC/*C* A*G*A* A*C*T* C*C*C* | |
| | /i2MOErT/*/i2MOErA/*/i2MOErA/* | |
| | /i2MOErT/*/32MOErC/ | |
| Compound_80 | /52MOErC/*/i2MOErA/*/i2MOErA/*/i2MOErG/*T*A* | 235 |
| | T*G*A* G*A*T* G*T*/i2MOErA/* | |
| | /i2MOErG/*/i2MOErG/*/32MOErT/ | |
| Compound_81 | /52MOErA/*/i2MOErA/*/i2MOErG/*/i2MOErC/*T*G* | 236 |
| | T*G*G* C*C*A* T*T*/i2MOErC/* | |
| | /i2MOErG/*/i2MOErG/*/i2MOErT/*/32MOErG/ | |
| Compound_82 | /52MOErG/*/i2MOErG/*/i2MOErC/* | 237 |
| | /i2MOErC/*/i2MOErA/*T* T*C*G* G*T*G* A*C*A* | |
| | /i2MOErT/*/i2MOErC/*/i2MOErA/* | |
| | /i2MOErG/*/32MOErG/ | |
| Compound_83 | /52MOErT/*/i2MOErG/*/i2MOErC/* A*A*T* A*G*G* | 238 |
| | C*T*T* G*/i2MOErA/*/i2MOErC/* | |
| | /i2MOErT/*/32MOErA/ | |
| Compound_84 | /52MOErG/*/i2MOErG/*/i2MOErC/*/i2MOErC/*A*T* | 239 |
| | T*C*G* G*T*G* A*C*/i2MOErA/* | |
| | /i2MOErT/*/i2MOErC/*/i2MOErA/*/32MOErG/ | |
| Compound_85 | /52MOErA/*/i2MOErG/*/i2MOErC/*/i2MOErT/*T*T* | 240 |
| | G*T*C* A*C*A* C*C*/i2MOErA/* | |
| | /i2MOErG/*/i2MOErT/*/i2MOErC/*/32MOErT/ | |
| Compound_86 | /52MOErT/*/i2MOErC/*/i2MOErA/*/i2MOErT/*T*C* | 241 |
| | T*C*C* G*A*A* T*C*/i2MOErT/* | |
| | /i2MOErG/*/i2MOErG/*/i2MOErT/*/32MOErC/ | |
| Compound_87 | /52MOErG/*/i2MOErT/*/i2MOErA/* | 242 |
| | /i2MOErA/*/i2MOErC/*A* C*T*T* T*C*A* C*G*C* | |
| | /i2MOErA/*/i2MOErA/*/i2MOErA/* | |
| | /i2MOErA/*/32MOErA/ | |
| Compound_88 | /52MOErA/*/i2MOErG/*/i2MOErG/* | 243 |
| | /i2MOErT/*/i2MOErA/*A* C*C*T* T*T*C* T*G*T* | |
| | /i2MOErG/*/i2MOErT/*/i2MOErC/* | |
| | /i2MOErT/*/32MOErG/ | |
| Compound_89 | /52MOErT/*/i2MOErT/*/i2MOErT/*/i2MOErG/*T*T*G | 244 |
| | *C*A*A*T*A*G*G*/i2MOErC/*/i2MOErT/*/i2MOErT/* | |
| | /i2MOErG/*/32MOErA/ | |
| Compound_90 | /52MOErA/*/i2MOErT/*/i2MOErT/*/i2MOErT/*/i2MO | 245 |
| | ErC/*G*C*C*A*A*A*C*T*T*C*/i2MOErT/*/i2MOErG/* | |
| | /i2MOErA/*/i2MOErG/*/32MOErG/ | |
| Compound_91 | /52MOErT/*/i2MOErC/*/i2MOErT/*/i2MOErC/*A*A*G | 246 |
| | *G*T*A*A*G*C*T*/i2MOErG/*/i2MOErA/*/i2MOErG/* | |
| | /i2MOErC/*/32MOErT/ | |
| Compound_92 | /52MOErT/*/i2MOErT/*/i2MOErC/*/i2MOErC/*/i2MO | 247 |
| | ErC/*A*G*A*A*C*T*C*C*C*T*/i2MOErA/*/i2MOErA/* | |
| | /i2MOErT/*/i2MOErC/*/32MOErA/ | |

[0623] The experiments were conducted with HS02 (primary human fibroblasts) in 96-well plates. 8000 cells/well were seeded in 96-well plates. 24 UBE3A targeting ASOs (22 exemplary ASOs+2 controls) were tested in an 8-point concentration-response curve (CRC) format, e.g., 8 different concentrations of each ASO were tested, and the response to the ASO treatment was measured and plotted against the different concentrations. Two control ASOs include a positive control to assess successful ASO delivery at 100 nM (“Pcontrol”) and a negative control, which is an ASO targeting a different gene TUG1 at 100 nM (“Ncontrol”). For each cell plate, there were also wells reserved to receive transfection reagents only (“TF only”) as another negative control for quality control (QC). All the ASOs were delivered by lipofectamine 2000 transfection (0.2 μl/well). The 22 exemplary ASOs were added to the cell medium at a concentration of 100 nM, 31.62 nM, 10 nM, 3.16 nM, 1.0 nM, 0.32 nM, 0.10 nM, or 0.032 nM.

[0624] Each ASO source plate was tested on duplicate cell plates in the same experiment; lysate from each cell well tested in duplicate were measured on the same qPCR plate.

[0625] Each cell well was treated with the respective ASOs for 24 hours before subject to nuclei counting and potency measurement. To count the number of nuclei of the cells that received the ASO treatment, 20 μl/well of Hoechst 33342 (50 μg/mL, nuclear staining) was added for 30 minutes. After staining, the cells were imaged by live-imaging on IN Cell Analyzer 2200 (GE Healthcare) with a 10× objective, 4 fields per well were captured, and automated analysis of the captured images was conducted with Columbus software (PerkinElmer).

[0626] After imaging, the cells were lysed using lysis solution with DNAse I (25 μl/well) and stop solution (2.5 μl/well) from TaqMan one-step Cells-to-Ct kit. The cell lysates were then subject to qPCR tests: 15% of the cell lysate from each well was added for qPCR reaction with TaqMan Master Mix from TaqMan one-step Cells-to-Ct kit.

[0627] For the TaqMan assays, Hs UBE3A assay 3 (FAM) was multiplexed with Hs HPRT1 (VIC). Upon completion of the TaqMan qPCT assay, calculations of the amount of UBE3A transcripts were done using the 2^{-ΔΔCt} C method, normalized to the measurement of internal reference HPRT1, and the changes in gene expression compared to control condition (100% expression) were then determined.

[0628] Cell loss in the lipofectamine-only condition (TF only, orange) is below 0% indicating some toxicity in the conditions transfected with ASOs. To account for those differences, data was normalized to TUG1 ASO negative CTRL per plate. Cell loss was below 20% for all the test ASOs except for 4 wells, indicating low toxicity in general.

[0629] FIGS. 1A-ID show the CRCs for each tested ASOs, including the 22 exemplary ASOs, as well the potency (percent knockdown of UBE3A mRNA transcripts) of Pcontrol and Ncontrol.

[0630] Table 5 summarizes average UBE3A knockdown percentage for each of the tested ASOs, including Pcontrol and Ncontrol, and their respective EC50. EC50s (half maximal effective concentrations) were calculated using a non-linear regression (4 parameter) analysis. There were a number of ASOs (eight) for which EC50 values could not be calculated because their CRCs did not result in a S-curve. They are labeled as n.d. (not determined) in the table.

TABLE 5
Potency and EC50 of Tested ASOs

| | Ave UBE3A KD (%) | EC50 (nM) |
|---|---|---|
| Compound_1 | 96.2 | 0.92 |
| Compound_2 | 93.2 | 0.92 |
| Compound_3 | 95.5 | 3.06 |
| Compound_4 | 94.1 | 0.77 |
| Compound_5 | 87.4 | 1.57 |
| Compound_6 | 92.5 | 1.28 |
| Compound_7 | 91.1 | 0.57 |
| Compound_8 | 81.5 | 3.19 |
| Compound_9 | 81.9 | n.d. |
| Compound_10 | 79 | n.d. |
| Compound_11 | 68.9 | 1.39 |
| Compound_12 | 79.5 | n.d. |
| Compound_13 | 72 | n.d. |
| Compound_14 | 69.3 | n.d. |
| Compound_15 | 72.7 | 3.17 |
| Compound_18 | 71.1 | n.d. |
| Compound_20 | 57.2 | n.d. |
| Compound_21 | 40.5 | 0.19 |
| Compound_22 | 44.1 | 0.44 |
| Ncontrol | −7 | n.d. |
| Pcontrol | 59.3 | 1.03 |

SEQUENCE LISTING
SEQ ID NO: 1
CGCTTCATTCGGCTAGCTTC
SEQ ID NO: 2
ATTCGGCTAGCTTCAATGTC
SEQ ID NO: 3
TCGCTTCATTCGGCTAGCTT
SEQ ID NO: 4
GCTTCATTCGGCTAGCTTCA
SEQ ID NO: 5
TCGGCTAGCTTCAATGT
SEQ ID NO: 6
CATTCGGCTAGCTTCAATGT
SEQ ID NO: 7
TCGGCTAGCTTCAATGTC
SEQ ID NO: 8
CCGGACAAGTGCATCATCTA
SEQ ID NO: 9
CCGGACAAGTGCATCATCT
SEQ ID NO: 10
TCACATTCCACGTTAGGTGA
SEQ ID NO: 11
CTTCTGGTCTGAATAAGTA
SEQ ID NO: 12
CGGACAAGTGCATCATCTAT
SEQ ID NO: 13
TGTACATGCGAATTCTATTG
SEQ ID NO: 14
TCCATAGCGATCATCTCTAG
SEQ ID NO: 15
TTCCGGCTTCCACATATAAG
SEQ ID NO: 16
CATTCTCCGAATCTGGTC
SEQ ID NO: 17
CCTTCCTGTTTTCATTTGTA
SEQ ID NO: 18
CCTTTCTGTGTCTGGGCCAT
SEQ ID NO: 19
CTCTTACAGATTTTTAACCT
SEQ ID NO: 20
TAGGTAACCTTTCTGTGTCT
SEQ ID NO: 21
GTGAACATACCAATATCTGG
SEQ ID NO: 22
GTATGAGATGTAGGTAACC
SEQ ID NO: 23
ACAGGTTGTCACACCAGTCT
SEQ ID NO: 24
AGTATGAGATGTAGGTAACC
SEQ ID NO: 25
AGCTGTGGCCATTCGGTGAC
SEQ ID NO: 26
CAAGTATGAGATGTAGGTA
SEQ ID NO: 27
GATAAGTGGTTTTCGACAAT
SEQ ID NO: 28
CGGACAAGTGCATCATCTAT
SEQ ID NO: 29
CCGGACAAGTGCATCATCT
SEQ ID NO: 30
GTAACACTTTCACGCAAAA
SEQ ID NO: 31
CATTCTCCGAATCTGGTC
SEQ ID NO: 32
GGACAAGTGCATCATCTAT
SEQ ID NO: 33
TCCATAGCGATCATCTCTAG
SEQ ID NO: 34
AAGCTGTGGCCATTCGGT
SEQ ID NO: 35
CCTTTCTGTGTCTGGGCCAT
SEQ ID NO: 36
CCTTCCTGTTTTCATTTGTA
SEQ ID NO: 37
ACATTCGGCTAGCTTCAATG
SEQ ID NO: 38
TTCGGCTAGCTTCAATGTC
SEQ ID NO: 39
TTCGGCTAGCTTCAATGT
SEQ ID NO: 40
CTTACATTCGGCTAGCTTC
SEQ ID NO: 41
CTTACATTCGGCTAGCTT
SEQ ID NO: 42
ATTCGGCTAGCTTCAATGT
SEQ ID NO: 43
TACCATATTTCGCCAAACT
SEQ ID NO: 44
ACCTTTCTGTGTCTGGGCCA
SEQ ID NO: 45
TCACATTCCACGTTAGGTG
SEQ ID NO: 46
CGTGTCTTTCTGTGTCTGGG
SEQ ID NO: 47
CTTACATTCGGCTAGCT
SEQ ID NO: 48
TGTCTTTCTGTGTCTGGGCC
SEQ ID NO: 49
CTTACCCGGCTTCCACATAT
SEQ ID NO: 50
TTACATTCGGCTAGCTTCA
SEQ ID NO: 51
ACATTCGGCTAGCTTCAAT
SEQ ID NO: 52
TTTGTTGCAATAGGCTTGAC
SEQ ID NO: 53
CATACCATATTTCGCCAAAC
SEQ ID NO: 54
CTTACATTCGGCTAGCTTCA
SEQ ID NO: 55
TCACATTCCACGTTAGGT
SEQ ID NO: 56
ATACCATATTTCGCCAAACT
SEQ ID NO: 57
CCGTGTCTTTCTGTGTCTGG
SEQ ID NO: 58
GTCTTTCTGTGTCTGGGCCA
SEQ ID NO: 59
AACCTTTCTGTGTCTGGGCC
SEQ ID NO: 60
GTGTCTTTCTGTGTCTGGGC
SEQ ID NO: 61
GTAGGTAACCTTTCTGTGTC
SEQ ID NO: 62
ACATTCCACGTTAGGTGACA
SEQ ID NO: 63
GTTGCAATAGGCTTGACTA
SEQ ID NO: 64
CAGGTTGTCACACCAGTCT
SEQ ID NO: 65
ACCATATTTCGCCAAACTTC
SEQ ID NO: 66
CTTACCCGGACAAGTGCATC
SEQ ID NO: 67
TTACCCGGACAAGTGCATC
SEQ ID NO: 68
GGCCATTCGGTGACATCA
SEQ ID NO: 69
TGATCTTTTACAAGCTGTGG
SEQ ID NO: 70
AGCAAGTATGAGATGTAGG
SEQ ID NO: 71
ACCATATTTCGCCAAACTT
SEQ ID NO: 72
GGTAACCTTTCTGTGTCTGG
SEQ ID NO: 73
ACAGGTTGTCACACCAGTC
SEQ ID NO: 74
GTTGCAATAGGCTTGACT
SEQ ID NO: 75
TGTGAACATACCAATATCTG
SEQ ID NO: 76
ACTGTACATGCGAATTCTAT
SEQ ID NO: 77
TTACCCGGACAAGTGCATCA
SEQ ID NO: 78
TGTAGGTAACCTTTCTGTGT
SEQ ID NO: 79
TTTCCCAGAACTCCCTAATC
SEQ ID NO: 80
CAAGTATGAGATGTAGGT
SEQ ID NO: 81
AAGCTGTGGCCATTCGGTG
SEQ ID NO: 82
GGCCATTCGGTGACATCAGG
SEQ ID NO: 83
TGCAATAGGCTTGACTA
SEQ ID NO: 84
GGCCATTCGGTGACATCAG
SEQ ID NO: 85
AGCTGTGGCCATTCGGTGA
SEQ ID NO: 86
TCATTCTCCGAATCTGGTC
SEQ ID NO: 87
GTAACACTTTCACGCAAAAA
SEQ ID NO: 88
AGGTAACCTTTCTGTGTCTG
SEQ ID NO: 89
TTTGTTGCAATAGGCTTGA
SEQ ID NO: 90
ATTTCGCCAAACTTCTGAGG
SEQ ID NO: 91
TCTCAAGGTAAGCTGAGCT
SEQ ID NO: 92
TTCCCAGAACTCCCTAATCA

### Example 2: In Vivo ASO Tolerance of Antisense Oligonucleotides (ASOs) Via Intracerebroventricular (ICV) Administration

[0631] This example illustrates experiments that were conducted to test the in vivo tolerability of certain exemplary ASOs of the present disclosure in mice.

[0632] Effects of the exemplary ASOs were examined by in vivo experiments via intracerebroventricular (ICV) administration into mice. Adult C57BL/6 mice were surgically implanted with an ICV cannula. Following recovery from surgery, mice received an ICV injection of ASO or Dulbecco's phosphate buffered saline (DPBS) on day 0. Observations were made pre-dose and 1 hour, 2 hours, 4 hours, 24 hours, and 7 days after dosing. Animals were terminated 2 weeks post-dose. Terminal plasma, brain, liver, heart, and kidney tissues were collected and stored.

[0633] Adult male C57Bl/6 mice were used for this study. Upon arrival, animals were housed one per cage in polycarbonate cages and acclimated for at least 4 days prior to commencing the study. Animals were housed on a 12/12 hr light/dark cycle with room temperature (22+2° C.) and humidity (˜50%) maintained. The animals had access to food and water ad libitum. Experiments were conducted in accordance with protocols approved by the Institutional Animal Care and Use Committee of Charles River Laboratories South San Francisco.

[0634] Dosing formulations were prepared at appropriate concentrations to meet target dose levels in each mouse (e.g., 400 μg/mouse, 500 ag/mouse). All ASOs were formulated with DPBS and stored at −80° C. until the day of dosing. Each animal test condition contained six animals and each animal received one dose of intracerebroventricular injection constituting 5 μl of a test sample according to the groupings presented in Table 6, with the exceptions of Groups 4, 14, and 25, which were dropped from the study due to solubility issues. Group 1 was the control condition in which only DPBS was administered, and Group 2 was the positive control in which Tominersen, a known antisense oligonucleotide treatment for reduction of huntingtin protein (HTT) and mutated huntingtin protein (mHTT) expression levels, was administered. Groups 3-26 were the experimental conditions using the ASOs named.

TABLE 6
Animal Testing Groups and Conditions

| | | | | Injection | | | |
|---|---|---|---|---|---|---|---|
| | Test Article | | Route of | volume | Concentration | Group | Dose/ |
| Group | (TA) | Dose | administration | (μl) | (mg/ml) | size | animal |
| 1 | Vehicle Control | NA/mouse | ICV | 5 | N/A | 6 | 1 |
| | (DPBS) | | | | | | |
| 2 | Tominersen | 400 | ICV | 5 | 80 | 6 | 1 |
| | | μg/mouse | | | | | |
| 3 | Compound_23 | 400 | ICV | 5 | 80 | 6 | 1 |
| | | μg/mouse | | | | | |
| 4* | Compound_22 | N/A | N/A | N/A | N/A | N/A | 0 |
| 5 | Compound_25 | 400 | ICV | 5 | 80 | 6 | 1 |
| | | μg/mouse | | | | | |
| 6 | Compound_26 | 400 | ICV | 5 | 80 | 6 | 1 |
| | | μg/mouse | | | | | |
| 7 | Compound_27 | 500 | ICV | 5 | 100 | 6 | 1 |
| | | μg/mouse | | | | | |
| 8 | Compound_12 | 400 | ICV | 5 | 80 | 6 | 1 |
| | | μg/mouse | | | | | |
| 9 | Compound_89 | 400 | ICV | 5 | 80 | 6 | 1 |
| | | μg/mouse | | | | | |
| 10 | Compound_29 | 500 | ICV | 5 | 100 | 6 | 1 |
| | | μg/mouse | | | | | |
| 11 | Compound_11 | 500 | ICV | 5 | 100 | 6 | 1 |
| | | μg/mouse | | | | | |
| 12 | Compound_5 | 500 | ICV | 5 | 100 | 6 | 1 |
| | | μg/mouse | | | | | |
| 13 | Compound_31 | 500 | ICV | 5 | 100 | 6 | 1 |
| | | μg/mouse | | | | | |
| 14* | Compound_32 | N/A | N/A | N/A | N/A | N/A | 0 |
| 15 | Compound_2 | 500 | ICV | 5 | 100 | 6 | 1 |
| | | μg/mouse | | | | | |
| 16 | Compound_14 | 500 | ICV | 5 | 100 | 6 | 1 |
| | | μg/mouse | | | | | |
| 17 | Compound_90 | 500 | ICV | 5 | 100 | 6 | 1 |
| | | μg/mouse | | | | | |
| 18 | Compound_91 | 500 | ICV | 5 | 100 | 6 | 1 |
| | | μg/mouse | | | | | |
| 19 | Compound_34 | 500 | ICV | 5 | 100 | 6 | 1 |
| | | μg/mouse | | | | | |
| 20 | Compound_92 | 500 | ICV | 5 | 100 | 6 | 1 |
| | | μg/mouse | | | | | |
| 21 | Compound_18 | 500 | ICV | 5 | 100 | 6 | 1 |
| | | μg/mouse | | | | | |
| 22 | Compound_20 | 500 | ICV | 5 | 100 | 6 | 1 |
| | | μg/mouse | | | | | |
| 23 | Compound_15 | 500 | ICV | 5 | 100 | 6 | 1 |
| | | μg/mouse | | | | | |
| 24 | Compound_4 | 500 | ICV | 5 | 100 | 6 | 1 |
| | | μg/mouse | | | | | |
| 25* | Compound_21 | N/A | N/A | N/A | N/A | N/A | 0 |
| 26 | Compound_17 | 500 | ICV | 5 | 100 | 6 | 1 |
| | | μg/mouse | | | | | |

### Surgical Procedures

### ICV Cannulation Surgery

[0635] Mice were anesthetized using isoflurane (2%, 800 mi/mmn O₂). Bupivacaine was used for local analgesia and carprofen was used for peni-/post-operative analgesia. The animals were placed in a stereotaxic frame (KOPF® Laboratory Instruments, USA). Surgery was performed using aseptic techniques. Anterior-Posterior (AP), Medial-Lateral (ML), and Dorsal-Ventral (DV) axes were zeroed on Bregma. The following coordinates were used for the ICV infusion cannula (PLASTICS ONE®, Roanoke, Virginia): AP −0.3 mm, lateral −1.0, DV −2.2 mm from dura. The locations of the burr holes were designated and drilled. The drill was only used to penetrate the bone, and the infusion cannula was lowered into the lateral ventricle. Two screws and dental acrylic were used to secure the ICV cannula. After surgery, animals were provided food and water ad libitum. Any animal exhibiting unusual or adverse signs were not used in the study.

### Pre-And Post-Operative Care

[0636] Carprofen (5 mg/kg SC) was administered before the surgery and Carprofen (0.067 mg/ml) was provided in the drinking water to animals for 3 days after surgery. Animals were carefully monitored on the day of surgery and once daily for an additional 3 days after surgery.

### ICV Infusion (Day 0):

[0637] At least 7 days after surgery, animals were dosed according to the conditions presented in Table 7. Animals were dosed while they were conscious. Infusion cannulas were placed into the ICV cannula, and the test article was infused at a rate of 0.08 μl/sec. Infusion cannulas were left in the guide cannula for an additional 30 seconds prior to removal and replacement of the dummy stylet.

TABLE 7
ASO Dosing Regimen and Infusion Conditions via ICV

| | | | | | | Injec- |
|---|---|---|---|---|---|---|
| | | | | Vol- | | tion |
| | | | Dosing | ume | Rate of | Time |
| Group | N | Test Article | Regimen | (μl) | Infusion | (sec) |
| 1 | 6 | Vehicle | ICV, day 0 | 5 | 0.08 μl/sec | 62.5 |
| | | Control (DPBS) | | | | |
| 2 | 6 | Tominersen | ICV, day 0 | 5 | 0.08 μl/sec | 62.5 |
| 3 | 6 | Compound_23 | ICV, day 0 | 5 | 0.08 μl/sec | 62.5 |
| 5 | 6 | Compound_25 | ICV, day 0 | 5 | 0.08 μl/sec | 62.5 |
| 6 | 6 | Compound_26 | ICV, day 0 | 5 | 0.08 μl/sec | 62.5 |
| 7 | 6 | Compound_27 | ICV, day 0 | 5 | 0.08 μl/sec | 62.5 |
| 8 | 6 | Compound_12 | ICV, day 0 | 5 | 0.08 μl/sec | 62.5 |
| 9 | 6 | Compound_89 | ICV, day 0 | 5 | 0.08 μl/sec | 62.5 |
| 10 | 6 | Compound_9 | ICV, day 0 | 5 | 0.08 μl/sec | 62.5 |
| 11 | 6 | Compound_11 | ICV, day 0 | 5 | 0.08 μl/sec | 62.5 |
| 12 | 6 | Compound_5 | ICV, day 0 | 5 | 0.08 μl/sec | 62.5 |
| 13 | 6 | Compound_31 | ICV, day 0 | 5 | 0.08 μl/sec | 62.5 |
| 15 | 6 | Compound_2 | ICV, day 0 | 5 | 0.08 μl/sec | 62.5 |
| 16 | 6 | Compound_14 | ICV, day 0 | 5 | 0.08 μl/sec | 62.5 |
| 17 | 6 | Compound_90 | ICV, day 0 | 5 | 0.08 μl/sec | 62.5 |
| 18 | 6 | Compound_91 | ICV, day 0 | 5 | 0.08 μl/sec | 62.5 |
| 19 | 6 | Compound_34 | ICV, day 0 | 5 | 0.08 μl/sec | 62.5 |
| 20 | 6 | Compound_92 | ICV, day 0 | 5 | 0.08 μl/sec | 62.5 |
| 21 | 6 | Compound_18 | ICV, day 0 | 5 | 0.08 μl/sec | 62.5 |
| 22 | 6 | Compound_20 | ICV, day 0 | 5 | 0.08 μl/sec | 62.5 |
| 23 | 6 | Compound_15 | ICV, day 0 | 5 | 0.08 μl/sec | 62.5 |
| 24 | 6 | Compound_4 | ICV, day 0 | 5 | 0.08 μl/sec | 62.5 |
| 26 | 6 | Compound_17 | ICV, day 0 | 5 | 0.08 μl/sec | 62.5 |

### Behavioral Observations

[0638] On the day of dosing, animals were observed and scored pre-dose, at 1 hour, 2 hours, 4 hours, 24 hours, and 1 week post-dose according to Table 8. Detailed clinical observations were noted, including gait and other hindlimb deficiencies. Adverse events included ataxia, seizure, gait or coordination changes and weight loss (15% or more).

TABLE 8
Behavioral Scoring Criteria

| Behavior | Code | Score | Description |
|---|---|---|---|
| Spontaneous Activity | A | 1 | Not moving spontaneously |
| | | 2 | Minimal spontaneous movement (1-3 steps at a time) and/or severely sluggish |
| | | 3 | Reduced time moving and/or very slow |
| | | 4 | Slowed movement, but time moving normal |
| | | 5 | Hyperactive/jumping |
| Reactivity | R | 1 | Hyporeactive (needs multiple and/or forceful touch to react) |
| | | 2 | Hyperreactive (jumping, scratching, running on contact) |
| Convulsion | C | 1 | Stereotypic behavior (chewing, head flicks, head switching) |
| | | 2 | Isolated hindlimb or forelimb clonus |
| | | 3 | Isolated generalized convulsions |
| | | 4 | Consistent or frequent convulsions |
| Motor | M | 1 | Unsteady or uncoordinated movements |
| | | 2 | Frequently tripping and/or falling while walking |
| | | 3 | Dragging part or all of body while walking |
| | | 4 | Unable to traverse |
| Breathing | B | 1 | Slow Breathing (significantly <~2-3 breaths per second at rest) |
| | | 2 | Rapid Breathing (significantly >~2-3 breaths per second at rest) |
| Physical | H | | Hunched posture |
| | L | | Lowered pelvic height |
| | D | | Disheveled coat |
| | P | | Piloerection |
| | E | | Ptosis |
| | T | | Tremor/shaky at rest |
| | HT | | Head tilt |
| | X | | Unable to right self within 5 seconds |

### Humane Endpoints Post-dose

[0639] After dosing, animals were euthanized before the scheduled euthanasia timepoint if they met the criteria presented in Table 9.

TABLE 9
Euthanasia Timepoints upon Observation of Animal Behavior

| Timeframe | Observed Behavior |
|---|---|
| Within 2 hours of dosing | Convulsion score of 4 |
| After 24 hours of dosing | Convulsion score of 2 or higher |
| After 24 hours of dosing | Motor score of 3 or 4 |
| After 24 hours of dosing | Activity score of 1 |

### Endpoint Sampling

### Scheduled Euthanasia and Sample Collection

[0640] Two weeks after dosing, animals were deeply anesthetized via isoflurane. Next, blood was collected, and animals were transcardially perfused with PBS followed by tissue collection.

### Early Euthanasia and Sample Collection

[0641] In the event that an animal needed to be euthanized before the scheduled euthanasia timepoint, tissues were collected. No tissues were collected from animals that were found dead (FD).

### Statistical Analysis and Data Graphical Representation

[0642] Data was plotted in Prism 9 for Windows (GraphPad Software, Inc.). A mixed-effects analysis was used to evaluate the body weights between groups across time. Tukey's post-hoc test was applied for individual group comparisons. Statistical significance was set at p<0.05.

### In Vivo Results

[0643] Three ASOs (Compound_22, Compound_32, and Compound_21) did not go into solution during formulation. Thus, these three treatment groups were not dosed as planned. Six other ASOs (Tominersen, Compound_23, Compound_25, Compound_26, Compound_12, and Compound_89) were only soluble at 80 mg/ml. Thus, animals from these six treatment groups were dosed at 400 μg ASO per mouse instead of the planned 500 μg ASO per mouse. All other ASO dosing went as planned.

[0644] Table 10 shows the number of animals in each treatment group that had reached the criteria for early euthanasia (early takedown, or eTD) or were found dead (FD) post-dose.

[0645] Table 11 depicts the behavioral observations at baseline, 1 hour, 2 hours, 4 hours, 24 hours, and 1 week post-dose. Abbreviations for behavioral scoring criteria can be found in Table 8. Asterisked items indicate that the animal was found dead after 1 week.

TABLE 10
Number of Animals Deceased or Requiring
Early Takedown in Each Treatment Group

| Treatment | | | # Animals FD per | # eTD per |
|---|---|---|---|---|
| Group | Treatment | N | Treatment Group | Treatment Group |
| 1 | D-PBS | 8 | 0 | 0 |
| 2 | Tominersen | 5 | 0 | 0 |
| 3 | Compound_23 | 6 | 1 | 0 |
| 5 | Compound_25 | 6 | 0 | 0 |
| 6 | Compound_26 | 6 | 0 | 0 |
| 7 | Compound_27 | 6 | 1 | 0 |
| 8 | Compound_12 | 5 | 0 | 0 |
| 9 | Compound_89 | 6 | 0 | 0 |
| 10 | Compound_9 | 6 | 1 | 1 |
| 11 | Compound_11 | 6 | 0 | 1 |
| 12 | Compound_5 | 6 | 0 | 1 |
| 13 | Compound_31 | 6 | 0 | 0 |
| 15 | Compound_2 | 6 | 2 | 0 |
| 16 | Compound_14 | 6 | 0 | 0 |
| 17 | Compound_90 | 5 | 0 | 1 |
| 18 | Compound_91 | 6 | 2 | 0 |
| 19 | Compound_34 | 6 | 0 | 0 |
| 20 | Compound_92 | 6 | 0 | 0 |
| 21 | Compound_18 | 6 | 0 | 0 |
| 22 | Compound_20 | 6 | 0 | 0 |
| 23 | Compound_15 | 6 | 1 | 0 |
| 24 | Compound_4 | 6 | 1 | 0 |
| 25 | Compound_17 | 6 | 0 | 3 |

TABLE 11
Animal Behavioral Scores After Treatment

| | | | Baseline Score | | | | |
|---|---|---|---|---|---|---|---|
| Animal | Treatment | | T = 1 hr | T = 2 hr | T = 4 hr | T = 24 hr | T = 1 wk |
| ID | Group | Treatment | Score | Score | Score | Score | Score |
| 1 | 1 | D-PBS | | | | | |
| 8 | 1 | D-PBS | | | | | |
| 40 | 1 | D-PBS | | | H, P | | |
| 49 | 1 | D-PBS | | | | | |
| 90 | 1 | D-PBS | | | | | |
| 96 | 1 | D-PBS | P | | | | |
| 126 | 1 | D-PBS | | | | B2 | |
| 131 | 1 | D-PBS | | | | B2 | |
| 97 | 2 | Tominersen | H | A5 | A5 | | |
| 102 | 2 | Tominersen | H, P | A5 | A5 | | |
| 107 | 2 | Tominersen | A4, M1, H, | A5, H | A5 | | |
| | | | P | | | | |
| 117 | 2 | Tominersen | | A5 | A5 | | |
| 123 | 2 | Tominersen | H | A5 | A5 | | |
| 41 | 3 | Compound_23 | B2, H, P | | | | |
| 50 | 3 | Compound_23 | B2, P | | | | |
| 57 | 3 | Compound_23 | A3, R1, C2, | A3, M1 | A3, M1, H | H, P | |
| | | | M3, B1, H | | | | |
| 64 | 3 | Compound_23 | A4, B2, P | | | | |
| 70* | 3 | Compound_23 | A3, R1, C1, | A2, R1, M4, | A2, M1, H, | | |
| | | | M2, B2, H | H, P | E | | |
| 76 | 3 | Compound_23 | A3, R1, M2, | A3, R1, M1, | M1, E | | |
| | | | B2 | H | | | |
| 92 | 5 | Compound_25 | A1, R1, H | A1, R1, H | A2, R1, M4 | | |
| 98 | 5 | Compound_25 | A1, R1, B2, | A2, R1, M1, | A2, M1 | | |
| | | | P | B2 | | | |
| 103 | 5 | Compound_25 | A1, R1, C2, | A2, R1, M4 | A2, M2 | | |
| | | | H, P | | | | |
| 108 | 5 | Compound_25 | A2, R1, M3, | A2, R1, M4, | A4, R1, M1 | | |
| | | | B2, H | H, P | | | |
| 124 | 5 | Compound_25 | A2, R1, M1, | A2, R1 | A3, R1, M1 | | |
| | | | B2, H | | | | |
| 125 | 5 | Compound_25 | A1, R1, B2 | A2, R1, M4, | A3, M1 | | |
| | | | | B2 | | | |
| 93 | 6 | Compound_26 | A1, R1, B1, | A2, R1, B2 | A4, M2 | | |
| | | | H | | | | |
| 99 | 6 | Compound_26 | A1, R1, B2 | A1, R1, B1 | A1, R1, B1 | | |
| 104 | 6 | Compound_26 | A1, R1, H | A1, R1, B1 | A2, M2 | | |
| 109 | 6 | Compound_26 | A1, R1, B2, | A1, R1, B1, | A2, R1, M4 | | |
| | | | P | P | | | |
| 114 | 6 | Compound_26 | A1, R1 | A1, B1 | A1, R1 | | |
| 119 | 6 | Compound_26 | A1, R1 | A1 | A1, R1 | | |
| 94 | 7 | Compound_27 | A1, R1, B1, | A1, R1, B1 | A1, R1, B2 | | |
| | | | H | | | | |
| 100 | 7 | Compound_27 | A1, R1, H | A1, R1, B2 | FD | | |
| 105 | 7 | Compound_27 | A1, R1, B1 | A1, R1, B1 | A1, B2 | | |
| 115 | 7 | Compound_27 | A1, R1, B1 | A1, R1, B2 | A1, B1 | | |
| 120 | 7 | Compound_27 | A2, R1, M1, | A1 | A2, R1, M4 | | |
| | | | H | | | | |
| 122 | 7 | Compound_27 | A1, R1, B2 | A1 | A1, R1 | | |
| 95 | 8 | Compound_12 | A1, R1, P | A2, R1, H | A3, R1, M2 | | |
| 101 | 8 | Compound_12 | A1, R1, B1, | A1, R1 | A3, M3 | | |
| | | | P | | | | |
| 106 | 8 | Compound_12 | A1, R1, P, | A1, R1, B1 | A3, M3 | | |
| | | | E | | | | |
| 116 | 8 | Compound_12 | A3, R1, B1, | A2, R1, M4 | A3, M2 | | |
| | | | H, P | | | | |
| 121 | 8 | Compound_12 | A2, R1, H | A2, R1, M4 | A3, R1, M1 | | |
| 42 | 9 | Compound_89 | A1, R1, E | A1, R1 | A1, R1, H, | | |
| | | | | | E | | |
| 43 | 9 | Compound_89 | A2, R1, M3, | A1, R1, H, | A3, M1, H, | P | |
| | | | H | E | P | | |
| 52 | 9 | Compound_89 | A1, R1, C3, | A1, R1, H | A2, R1, M3, | H | |
| | | | H | | H | | |
| 65 | 9 | Compound_89 | A1, R1, H | A1, R1, H | A2, R1, M3, | | |
| | | | | | H, E | | |
| 71 | 9 | Compound_89 | A1, R1, H, | A1, R1, B1, | A1, H, E | P | |
| | | | P | E | | | |
| 77 | 9 | Compound_89 | A1, R1, B2, | A1, R1, B1, | A2, R1, M2, | | |
| | | | H | H | B1, H | | |
| 47 | 10 | Compound_9 | A1, R1, C3, | A1, R1, B1, | A1, R1, B1, | H | |
| | | | B1 | H | H | | |
| 51 | 10 | Compound_9 | A1, R1, B1 | A1, B1 | A1, R1, B1, | P, H | |
| | | | | | H, E | | |
| 54 | 10 | Compound_9 | A1, R1, C3, | A1, R1, B1, | A1, R1, B1, | | |
| | | | H | H, P, E | H | | |
| 59 | 10 | Compound_9 | FD | | | | |
| 66 | 10 | Compound_9 | C4, eTD | | | | |
| 78 | 10 | Compound_9 | A1, R1, C3, | A1, R1, B1, | A1, R1, B1, | A5, R2 | |
| | | | B1, H | H | H, E | | |
| 82 | 11 | Compound_11 | A1, R1, H | A2, R1, M3, | A1, R1, H, | | |
| | | | | H | E | | |
| 84 | 11 | Compound_11 | A2, R1, B2, | A1, R1, B1, | A2, M2, H | | |
| | | | H | H, P | | | |
| 85 | 11 | Compound_11 | A1, R1, B1, | A1, R1, B1, | A2, R1, M3, | | |
| | | | H | H, P | H, E | | |
| 86 | 11 | Compound_11 | C4, eTD | | | | |
| 87 | 11 | Compound_11 | A1, R1, B1, | A1, R1, B1, | A1, B2, H, | P | |
| | | | H | H, E | P, E | | |
| 88 | 11 | Compound_11 | n/a | A1, R1, H, | A1, R1, H, | P | |
| | | | | E | E | | |
| 2 | 12 | Compound_5 | C4, eTD | | | | |
| 9 | 12 | Compound_5 | A1, R1, C3, | A1, R1, B1 | A1 | | |
| | | | B1 | | | | |
| 15 | 12 | Compound_5 | A1, C3, B1 | A1, B1 | A2 | | |
| 21 | 12 | Compound_5 | A1, R1, C3 | A1, R1 | A1, R1, B2 | | |
| 27 | 12 | Compound_5 | A2, R1, C1, | A2, R1, M4 | A1, R1 | | |
| | | | C3, M3 | | | | |
| 33 | 12 | Compound_5 | A2, M4 | A1, B1 | A3, M3 | | |
| 127 | 13 | Compound_31 | A3, R1, M2 | M2, H | M1, H | | |
| 132 | 13 | Compound_31 | A4, M1, H, | M2 | M1 | B2 | A5 |
| | | | P | | | | |
| 136 | 13 | Compound_31 | A4, M1, H, | A4, M1, H | M1, H | | |
| | | | L | | | | |
| 140 | 13 | Compound_31 | A4, M1 | A4, M2 | M1 | P, R2 | |
| 144 | 13 | Compound_31 | A4, M2, P | A4, M2, P | A4, M1 | | |
| 148 | 13 | Compound_31 | A3, M1, H, | A4, M1, P | A4, P | | |
| | | | P | | | | |
| 3 | 15 | Compound_2 | A2, M1, B2 | M1 | | | |
| 10 | 15 | Compound_2 | FD | | | | |
| 16 | 15 | Compound_2 | A4 | A3, M1 | M1 | | |
| 22 | 15 | Compound_2 | A4, M1 | | | | R1, M1, HT, |
| | | | | | | | P |
| 28 | 15 | Compound_2 | A4, R1, M2, | | | | |
| | | | B2 | | | | |
| 34 | 15 | Compound_2 | A4, M1 | M1 | | | FD |
| 128 | 16 | Compound_14 | A4, R1, M1, | M1, H, P | H | | |
| | | | H | | | | |
| 133 | 16 | Compound_14 | A4, M1, H, | A4, M2, P | A4, M1, P | | |
| | | | P | | | | |
| 137 | 16 | Compound_14 | A4, M1, H | A4, M2, H | A4, M1, P | | |
| 141 | 16 | Compound_14 | A4, M2 | A4, M2 | A3, H | | |
| 145 | 16 | Compound_14 | A4, M1 | M1 | M1 | | |
| 149 | 16 | Compound_14 | A4, M1, H, | M1, P | A4, P | | |
| | | | P | | | | |
| 44 | 17 | Compound_90 | A2, R1, M4, | A1, R1, H | A3, M2, H | | |
| | | | H, P | | | | |
| 60 | 17 | Compound_90 | C4, eTD | | | H, P | |
| 67 | 17 | Compound_90 | A1, R1, B1, | A1, R1, H | A2, R1, M4, | | |
| | | | H | | H, E | | |
| 73 | 17 | Compound_90 | A2, R1, M3, | A1, R1, C1, | A2, M2, H | | |
| | | | B1, H | B1, H | | | |
| 79 | 17 | Compound_90 | A1, H, P | A1, R1, H, | M1, H | | |
| | | | | P | | | |
| 4 | 18 | Compound_91 | A1, R1, B1 | A1, R1, B1 | A1, R1, B1 | H, P | |
| 11 | 18 | Compound_91 | A1, R1, B1 | A1, R1, B1 | A1, R1 | R1 | |
| 17 | 18 | Compound_91 | A1, C3, B1 | A1, B1 | A1 | | |
| 23 | 18 | Compound_91 | A2, R1, M4 | A1, R1, B1 | A1, R1 | | |
| 29 | 18 | Compound_91 | A1, R1 | A1, R1, B1 | A1, R1 | | |
| 35 | 18 | Compound_91 | A1, R1, C3, | A1, R1, B1 | A1, R1, B1 | | |
| | | | B1 | | | | |
| 45 | 19 | Compound_34 | A1, R1, B1, | A1, R1, B1, | A1, R1, B2, | | |
| | | | H | H | H | | |
| 56 | 19 | Compound_34 | A1, R1, C3, | A1, R1, H | A1, R1, B1, | H, M1 | |
| | | | B1, H, P | | H, E | | |
| 63 | 19 | Compound_34 | A1, R1, B1, | A1, R1, H | A3, M2, H, | | |
| | | | H | | E | | |
| 68 | 19 | Compound_34 | A1, R1, B2, | A1, R1, H | A1, R1, H, | P, H | |
| | | | H | | E | | |
| 74 | 19 | Compound_34 | A1, R1, B1, | A1, R1, B1, | A1, R1, B1, | | |
| | | | H | H | H, E | | |
| 80 | 19 | Compound_34 | A1, R1, B2 | A1, R1, B1, | A1, R1, B1, | P | |
| | | | | H | H, E | | |
| 5 | 20 | Compound_92 | P | | | | |
| 12 | 20 | Compound_92 | B2, P | | | | |
| 18 | 20 | Compound_92 | | | | | |
| 24 | 20 | Compound_92 | | | | | |
| 30 | 20 | Compound_92 | M3 | | B2 | | |
| 36 | 20 | Compound_92 | | | | | |
| 48 | 21 | Compound_18 | A2, R1, M4, | A2, M3, B2, | A2, R1, B1, | P | |
| | | | H, P | H | P, E | | |
| 55 | 21 | Compound_18 | A1, R1, B1, | A1, H | A1, R1, B1, | P | |
| | | | H, P | | H, E | | |
| 62 | 21 | Compound_18 | A1, R1, H | A1, R1, H | A1, R1, B2, | | |
| | | | | | H, P | | |
| 69 | 21 | Compound_18 | A2, R1, M4, | A1, R1, H | A1, R1, H, | | |
| | | | B1 | | E | | |
| 75 | 21 | Compound_18 | A1, R1, H | A1, R1, B1, | A1, R1, B1, | | |
| | | | | H | H, E | | |
| 81 | 21 | Compound_18 | A1, R1, B2, | A1, R1, B1, | A1, H, E | P | |
| | | | H, P | H, P | | | |
| 129 | 22 | Compound_20 | A4, M1, B2, | P | | B2 | |
| | | | H | | | | |
| 134 | 22 | Compound_20 | A4, M1, P | | | | |
| 142 | 22 | Compound_20 | A4, P | | | | A5 |
| 146 | 22 | Compound_20 | A4, M1 | A4, M1 | A4, H, P | | |
| 150 | 22 | Compound_20 | B2, H, E | H | | P | |
| 155 | 22 | Compound_20 | H, P | | A5, R2 | R2, B2 | A5 |
| 6* | 23 | Compound_15 | A4, R1, C2 | | | | |
| 13 | 23 | Compound_15 | | | | | |
| 19 | 23 | Compound_15 | M3 | | | | |
| 25 | 23 | Compound_15 | | | | H | |
| 31 | 23 | Compound_15 | C3 | | | | |
| 37 | 23 | Compound_15 | | | | | |
| 7 | 24 | Compound_4 | A1, R1, B1 | A1, R1, B1 | A1, R1 | | |
| 14 | 24 | Compound_4 | A1, R1, B1 | A1, R1, B1 | A1, R1 | | |
| 20* | 24 | Compound_4 | A1, R1 | A1, R1 | A3, M1 | | |
| 26 | 24 | Compound_4 | A1, R1, C3 | A1, R1, B1 | A1, R1, B1 | | |
| 32 | 24 | Compound_4 | C3 | A4, R1, M4 | A1, R1 | | |
| 39 | 24 | Compound_4 | A2, R1, M3 | A2, R1, M3 | A3, M2 | | |
| 130 | 26 | Compound_17 | A4, M1, H | M1, P | M1, H | | |
| 135 | 26 | Compound_17 | A4, M1, B2, | A4, M2, P | M1, H, P | | |
| | | | H | | | | |
| 139 | 26 | Compound_17 | A4, M1, B2, | A5, M1 | | | |
| | | | H | | | | |
| 143 | 26 | Compound_17 | A4, M1 | M1 | | | A4, HT |
| 147 | 26 | Compound_17 | A4 | A4, M1 | M3, H, P | | |
| 151 | 26 | Compound_17 | H | H | P | | A4, R1, HT |

### Example 3: UBE3A Knockdown by ASOs at mRNA and Protein Levels in F-Dup Neurons

[0646] This example illustrates experiments that were conducted to test the effect of certain exemplary ASOs of the present disclosure on UBE3A mRNA level and protein expression levels in neuronal cells derived from human induced pluripotent stem cells (iPSCs), which were acquired by dedifferentiating cells from Dup15q patients (F-Dup Neurons).

[0647] UBE3A knockdown was assessed at mRNA and protein levels after treatment of the neuronal cells with ten exemplary ASOs of the present disclosure. Human induced pluripotent stem cell-derived (hiPSC-derived) F-Dup neurons and corrected neurons (neuronal cells derived from human iPSCs, which were sourced from Dup 15q patient but had been genetically “corrected” to remove the supernumerary chromosome) were seeded at 150,000 cells/well in 96-well plates. POS1 and POS2 targeting UBE3A were used as positive controls for qPCR. Scr GFP_ASO, scr P1, and NEAT1 ASO were used as negative controls in F-Dup and corrected, untreated cells. scr Pq was used as the negative control for qPCR only.

[0648] ASOs were delivered by gymnosis. Control ASOs were used at a concentration of 5 μM for qPCR. Test and control ASOs were delivered at concentrations around 6.33 μM and 20 μM. Each ASO plate source was tested in duplicate on the same cell plate, and lysate from each cell well was tested in technical duplicates on the same qPCR plate, in addition to technical singlicates in separate runs.

[0649] hiPSC-derived F-Dup neurons and corrected neurons were cultured for a total of about 21 days, and culture medium was refreshed every two or three days. Cells were treated with ASOs starting on the 7^{th} day of culturing for seven days, after which the cells were cultured in culture medium without ASO supplementation for an additional seven days, including the day of transition from ASO supplementation to no ASO supplementation. These ASO-treated cells were then harvested on the 14^{th} day of culturing, or on the 7^{th} day after the first ASO treatment, and subsequently harvested every two or three days thereafter for a total of three lysate harvests.

[0650] Specifically, cell lysate was harvested for qPCR and protein analysis on the 7^{th} 10^{th}, and 14^{th} days after the first day of ASO treatment, or equivalent to the 14^{th} 17^{th} and 21^{st} days of total culture time. The wash-out phase of culturing began after termination of ASO treatment and the transition to using non-ASO culture medium and lasted 7 days.

### Cell Lysate Preparation

[0651] Lysis was done with RIPA Lysis and Extraction Buffer (Thermo Fisher catalog #89900) supplemented with Halt Protease Inhibitor Cocktail (Thermo Fisher catalog #1861278) at 30 μl buffer per condition per well. Lysis preparation for qPCR analysis included using a lysis solution supplemented with DNase I (25 μl/well) and stop solution (2.5 μl/well) from the Invitrogen Cells-to-CT 1-Step TaqMan Kit (Thermo Fisher catalog #A25602).

### Protein Quantification

[0652] Total protein level of the cell lysates was quantified by assessing protein yield with a Bicinchoninic acid (BCA) assay, which provides a colorimetric detection and quantitation of total protein. Two biological replicates were evaluated for each test ASO, positive and negative control ASO, and untreated cells. UBE3A protein level was quantified by Jess Western blot. The primary antibody used was Proteintech's UBE3A antibody from a rabbit host (Proteintech catalog #10344-1-AP) and diluted 1:10 in 10% goat serum. The secondary antibody used was an anti-rabbit secondary HRP antibody, 1λ. Each sample was normalized to a final concentration of total protein.

Sample Preparation for qPCR Analysis

[0653] 15% of the volume of prepared lysate from each sample was used in a qPCR reaction with TaqMan Master Mix from the Invitrogen Cells-to-CT 1-Step TaqMan Kit. A FAM-labeled human UBE3A probe was used concurrently with the Applied Biosystems™ Human RPLP0 (large ribosomal protein) Endogenous Control (VIC™/TAMRA Probe, Primer Limited).

### Experimental Setup

[0654] Ten ASOs were tested in duplicate at two concentrations (6.3 μM and 20 μM) in each cell plate. Seven cell plates were used. ASO controls were included in one concentration (5 μM) in every plate for normalization of qPCR data for each plate during data analysis. NEAT1 ASO, F-Dup Non-treated and Corrected Non-treated were used as reference points to assess ASO-induced knockdown. All test ASOs at their two concentrations and one set of controls (POS1, POS2, NEAT1 ASO, scr GFP_ASO, scr P1, F-Dup Non-treated, and Corrected Non-treated) were processed in Bio-Techne's ProteinSimple Jess automated Western Blot instrument for protein quantification by protein separation and immunodetection.

Assay Performance of Control and Test ASOs Across qPCR Plates at Treatment Days 7 and 10 (mRNA)

[0655] The UBE3A assay performed consistently with high UBE3A knockdown levels and limited variability in the control ASO populations. Successful ASO delivery was confirmed by >65% and >40% UBE2A knockdown by POS1 and POS2, respectively, versus NEAT1 ASO, which did not result in UBE3A mRNA knockdown. Positive control ASOs had similar levels of UBE3A mRNA knockdown on both treatment days 7 and 10 and thus indicate that there is a clear and stable effect.

UBE3A Knockdown at mRNA and Protein Levels Normalized to NEAT1 ASO at ASO Treatment Days 7, 10, and 14

[0656] ASO treatment via gymnosis with UBE3A-targeting ASOs resulted in concentration-dependent UBE3A protein knockdown for test ASOs that were normalized to NEAT1 ASO on ASO treatment days 7,10, and 14, equivalent to wash-out days 0, 3, and 7, or the 14^{th} 17^{th} and 21^{st} days of time in culture (FIGS. 3C-3D). The UBE3A mRNA knockdown effect was only slightly increased at day 10, suggesting that there may have been abundant intracellular ASO present on day 7 at these concentrations (6.3 μM and 20 μM) (FIGS. 3A-3B). Compound_25 resulted in the highest UBE3A mRNA knockdown, while Compound_11 and Compound_20 resulted in the lowest UBE3A mRNA knockdown.

[0657] All test ASOs induced concentration- and time-dependent UBE3A protein knockdown, corroborating the effect observed at the mRNA level. Data presented in the figures of this example represent the average of technical singlicates +/−SD per condition (biological replicates n=2), corresponding to each treatment day.

[0658] UBE3A protein knockdown increased progressively with longer ASO treatments. By treatment day 10, all 10 exemplary test ASOs were able to knock down 50-80% of UBE3A protein at 20 μM. By treatment day 14, all exemplary test ASOs induced >60% UBE3A protein knockdown at 20 μM.

[0659] No datapoints were obtained for Compound_34 (mRNA & protein) and Compound_17 (protein) at 6.3 μM at treatment Day 10. No datapoints were collected for Compound_31 and Compound_34 (protein) at 20 μM at treatment Day 14. No datapoints were collected for NT corrected (mRNA) at 6.3 μM at treatment Day 7.

Comparison of UBE3A mRNA and Protein Expression Levels Between F-Dup and Corrected Neurons

[0660] Relative UBE3A mRNA expression level between F-Dup 1-8 cells and F-Dup 1-8 corrected cells on differentiation day 11, equivalent to the day before initiation of ASO treatment, indicate about a 2.5-fold difference (FIG. 4A). Relative UBE3A protein expression level between F-Dup 1-8 cells and F-Dup 1-8 corrected cells on differentiation day 11, equivalent to the day before initiation of ASO treatment, indicate about 1.25-fold difference (FIG. 4B).

[0661] On differentiation days 19, 22, and 26, equivalent to the 14^{th} 17^{th} and 21^{st} days of culture, or the 0^{th} 3^{rd}, and 7^{th} days after ASO treatment was terminated and non-ASO culture medium was used, expression of UBE3A mRNA and UBE3A protein were evaluated. UBE3A mRNA was generally elevated in F-Dup 1-8 cells. More specifically, expression of UBE3A mRNA was elevated by about 2-fold in F-Dup 1-8 cells relative to F-Dup 1-8 corrected cells (FIG. 4C); however, there was a smaller fold change between the two cell lines for UBE3A protein expression levels (between about 1.24-fold to about 1.6-fold) (FIG. 4D). This difference in relative mRNA vs protein expression may be explained by different regulation pathways of the additional copies of UBE3A, or a short protein half-life that prevents excessive accumulation in the cells.

[0662] Data presented in FIGS. 4A-4D represent the average of technical duplicates +/−SD per condition (biological replicates n=2-4), corresponding to each differentiation day. No data was collected for mRNA from the Corrected neurons on differentiation Day 19.

### UBE3A Protein Expression Levels at ASO Treatment Days 7 and 10

[0663] ASO treatment via gymnosis with UBE3A-targeting ASOs resulted in concentration-responsive and time-dependent UBE3A protein knockdown for exemplary test ASOs that were normalized to NEAT1 ASO (FIGS. 5A-5B). Protein expression levels were normalized to total protein output. Data represent the average of technical singlicates +/−SD per condition (biological replicates n=2), corresponding to each treatment day (NT=non-treated). No data points were collected for 6.3 μM for Compound_34 on treatment Day 10, or for Compound_17 on treatment Days 10 and 14. No datapoints were collected for 20 μM Compound_31 or Compound_34 on treatment Day 14. D7, D10, and D14 on the figures represent day 7, day 10, and day 14 after ASO treatment (treatment Days 7, 10, 14), respectively.

TABLE 12
Summary of Results for 10 Exemplary ASOs in Rat and iPSC-derived Neuron Studies

| | Primary | Primary screen | | | | | | ASO validation in rat fibroblasts | | | | | |
|---|---|---|---|---|---|---|---|---|---|---|---|---|---|
| | screen/Potency | (ASO 100 nM, Hs) | | | | Summary | | (ASO 100 nM top concentration, Rn) | | | | | |
| | determination/Rat | AVE | SD | UBE3A | SD | UBE3A | | AVE | SD | UBE3A | SD | | Immunotoxicity |
| | validation/ | cell | cell | KD | UBE3A | AVE | EC50 | cell | cell | KD | UBE3A | Sigmoidal | High/medium/ |
| Compound ID | Immunotox | loss | loss | (%) | KD | KD | (nM) | loss | loss | (%) | KD | CRC | low |
| Compound 25 | 3/8/8/9 | 10.5 | 6.2 | 40.1 | 0.8 | 36.9 | 0.9 | 7 | 2.8 | 84.3 | 2.1 | Yes | Low |
| Compound_89 | 3/8/8/9 | 5.2 | 1.2 | 70.0 | 3.7 | 68.6 | 2.5 | 4.4 | N.A. | 68.5 | 3.7 | Yes | Med |
| Compound_11 | 3/4/6/5 | 14.2 | 3.5 | 79.7 | 2.2 | 68.9 | 1.4 | −6.8 | 5.8 | 26.9 | 13.1 | Yes | Low |
| Compound_31 | 3/4/6/7 | 0.2 | 2.7 | 76.1 | 2.2 | 52.8 | 0 | −30.5 | 3.1 | 63.4 | 1.5 | Yes | Low |
| Compound_14 | 3/4/6/7 | 1.4 | 7.4 | 77.6 | 1 | 69.3 | n.d. | −10.5 | 9.3 | 58.4 | 13.7 | Yes | Low |
| Cmpound_34 | 3/8/8/9 | 2.2 | 0.8 | 49.6 | 1.2 | 48.7 | 1.7 | −1.3 | 7.3 | 76.1 | 5.1 | Yes | Low |
| Compound_92 | 3/8/8/9 | −7.7 | 2.1 | 62.9 | 4.8 | 58.5 | 1.1 | −11 | 3.8 | 43.7 | 5.7 | Yes | Low |
| Compound_20 | 3/4/6/7 | 13.6 | 3.2 | 62.8 | 1.6 | 57.2 | n.d. | −10.3 | 2.4 | 49.3 | 1.1 | Yes | Low |
| Compound_15 | 3/4/6/5 | 3.5 | 2.8 | 77.4 | 1.3 | 72.7 | 3.2 | −5.1 | 1.2 | 57.7 | 3.8 | Yes | Low |
| Compound_17 | 3/4/6/7 | −23.6 | 1.8 | 75.8 | 1.9 | 54.4 | 0.1 | −21.9 | 4.0 | 53.9 | 2.4 | Yes | Low |

TABLE 13
Summary of UBE3A Percentage of Knockdown Results for RNA and Protein

| | | | | Exp16_ | Exp16_ | | Exp16_ | | Expl6_s | |
|---|---|---|---|---|---|---|---|---|---|---|
| | | | | F-Dup | F-Dup | | F-Dup | | F-Dup | |
| | | | | neurons | neurons | | neurons | | neuron | |
| | | | | Ph3A | Ph3B | | Ph3B | | Ph3B | |
| Compound | | Sequence | | (D7) | (D7) | | (D10)\| | | (D14) | |
| ID | Length | (1) | | RNA | RNA | Protein | RNA | Protein | RNA | Protein |
| Compound_25 | 20 | AGCTGTGGCC | | 93 | 86.9 | 39.1 | 89.8 | 61.9 | 94.2 | 78.2 |
| | | ATTCGGTGAC | | | | | | | | |
| Compound_89 | 19 | TTTGTTGCAA | SoW2 | 62.6 | 52.8 | 48.7 | 56.5 | 65.9 | 61.5 | 81.4 |
| | | TAGGCTTGA | | | | | | | | |
| Compound_11 | 19 | CTTCTGGTCT | | 53.3 | 31.8 | 32.4 | 43.9 | 54.9 | 50.9 | 65.7 |
| | | GAATAAGTA | | | | | | | | |
| Compound_31 | 18 | CATTCTCCGA | | 85 | 67.3 | 71.5 | 75.3 | 79.7 | 75.2 | N/A |
| | | ATCTGGTC | | | | | | | | |
| Compound_14 | 20 | TCCATAGCGA | | 87.8 | 61.2 | 62.3 | 71 | 76 | 69.7 | 87.1 |
| | | TCATCTCTAG | | | | | | | | |
| Compound_34 | 18 | AAGCTGTGG | | 87.9 | 70.6 | 46.7 | 76.9 | 56.8 | 73.8 | N/A |
| | | CCATTCGGT | | | | | | | | |
| Compound_92 | 20 | TTCCCAGAAC | | 82.8 | 31.6 | 48 | 52.1 | 61.3 | 49.8 | 74.9 |
| | | TCCCTAATCA | | | | | | | | |
| Compound_20 | 20 | TAGGTAACCT | | 42.2 | 15.9 | 43.6 | 41.2 | 50.2 | 35 | 61.4 |
| | | TTCTGTGTCT | | | | | | | | |
| Compound_15 | 20 | TTCCGGCTTC | | 71.4 | 42.9 | 46.3 | 60.7 | 56.1 | 56. | 74.4 |
| | | CACATATAAG | | | | | | | | |
| Compound_17 | 20 | CCTTCCTGTT | | 78.8 | 68.5 | 73.8 | 73.5 | 78.9 | 74.6 | 90 |
| | | TTCATTTGTA | | | | | | | | |

TABLE 14
Assay Performance: Acceptance Criteria and Results for JESS Runs (Protein)
ASO [20 μM]

| | Day 7 | | | Day 10 | | | Day 14 | | |
|---|---|---|---|---|---|---|---|---|---|
| | Corrected | % | | Corrected | % | | Corrected | % | |
| Compound | Area | UBE3A | | Area | UBE3A | | Area | UBE3A | |
| ID | UBE3A | KD | S/N >20 | UBE3A | KD | S/N >20 | UBE3A | KD | S/N >20 |
| Compound_25 | 11809.6 | 49 | All samples passed | 19890.8 | 56.6 | All samples passed | 11670.35 | 72.5 | All samples passed |
| Compound_89 | 14140.6 | 39 | All samples passed | 20005.5 | 56.3 | 1 sample is <20, | 16312.35 | 64.5 | All samples passed |
| | | | | | | Excluded | | | |
| Compound_11 | 16266.05 | 29.8 | All samples passed | 27441.9 | 40.1 | All samples passed | 21073 | 54.5 | All samples passed |
| Compound 31 | 9088.65 | 60.8 | All samples passed | 15652.45 | 65.8 | All samples passed | 12244.55 | 73.3 | All samples passed |
| Compound_14 | 10782.55 | 53.5 | All samples passed | 17771.3 | 61.2 | All samples passed | 10684.2 | 76.1 | All samples passed |
| Compound_34 | 14238.2 | 38.5 | All samples passed | N/A | N/A | 1 sample is <20, | 19534.9 | 57.8 | 1 sample is <20, |
| | | | | | | Excluded | | | Excluded |
| Compound_92 | 12990.85 | 43.9 | All samples passed | 24263.2 | 47 | All samples passed | 18380.45 | 60.4 | All samples passed |
| Compound_20 | 17315.05 | 25.3 | All samples passed | 28864.9 | 37 | All samples passed | 19336.8 | 58.2 | 1 sample is <20, |
| | | | | | | | | | Excluded |
| Compound_15 | 14725.3 | 36.5 | All samples passed | 28204.75 | 38.4 | All samples passed | 15995.3 | 61.4 | All samples passed |
| Compound_17 | 6222.6 | 73.1 | 1 sample is <20, | N/A | N/A | 1 sample is <20, | 9244.4 | 80.1 | 1 sample is <20, |
| | | | Excluded | | | Excluded | | | Excluded |
| NEAT1 ASO | 23162.3 | 0 | All samples passed | 45765.9 | 0 | All samples passed | 45328.7 | 0 | All samples passed |
| NT F-Dup | 24158.85 | •9.3 | All samples passed | 49675.35 | −8.6 | All samples passed | 43114.25 | 10.5 | All samples passed |
| NT Corrected | 14823.7 | N/A | All samples passed | 40691.2 | N/A | All samples passed | 25586.9 | N/A | All samples passed |

TABLE 15
Assay Performance: Acceptance Criteria and Results for JESS Runs (Protein)

| | Day 7 | | | Day 10 | | | Day 14 | | |
|---|---|---|---|---|---|---|---|---|---|
| | Corrected | % | | Corrected | % | | Corrected | % | |
| Compound | Area | UBE3A | | Area | UBE3A | | Area | UBE3A | |
| ID | UBE3A | KD | S/N >20 | U8E3A | KD | S/N >20 | U8E3A | KD | S/N >20 |
| Compound_25 | 12797 | 39.1 | All samples passed | 17438.3 | 61.9 | All samples passed | 11674.6 | 76.7 | All samples passed |
| Compound_89 | 10781.15 | 48.7 | All samples passed | 15577.3 | 65.9 | All samples passed | 9228 | 81.6 | All samples passed |
| Compound_11 | 14212.2 | 32.4 | All samples passed | 20611.8 | 54.9 | All samples passed | 16974.7 | 66.2 | All samples passed |
| Compound 31 | 5981.7 | 71.5 | All samples passed | 9279.4 | 79.7 | All samples passed | N/A | N/A | 1 sample is <20, |
| | | | | | | | | | Excluded |
| Compound_14 | 7942.25 | 62.3 | All samples passed | 11001.5 | 76 | All samples passed | 6692.3 | 86.7 | All samples passed |
| Compound_34 | 11198.25 | 46.7 | All samples passed | 19762.1 | 56.8 | All samples passed | N/A | N/A | 1 sample is <20, |
| | | | | | | | | | Excluded |
| Compound_92 | 10940.2 | 48 | All samples passed | 17709.4 | 61.3 | All samples passed | 12849.65 | 74.4 | All samples passed |
| Compound_20 | 11852 95 | 43.6 | All samples passed | 22762.85 | 50.2 | All samples passed | 19284.35 | 61.6 | All samples passed |
| Compound_15 | 11290.85 | 46.3 | All samples passed | 20048.9 | 56.1 | 1 sample at the limit | 13289.4 | 73.5 | All samples passed |
| | | | | | | (20.9), Excluded | | | |
| Compound_17 | 5499.05 | 73.8 | All samples passed | 9662.3 | 78.9 | All samples passed | 5175.45 | 89.7 | All samples passed |
| NEAT1ASO | 21018.4 | 0 | All samples passed | 45711.1 | 0 | 1 sample at the limit | 50200.4 | 0 | All samples passed |
| | | | | | | (21.8), Excluded | | | |
| NT F-Dup | 24158.85 | −9.3 | All samples passed | 49675.35 | −8.6 | All samples passed | 43114.25 | 10.5 | All samples passed |
| NT Corrected | 14823.7 | N/A | All samples passed | 40691.2 | N/A | All samples passed | 33736.6 | N/A | All samples passed |

[0664] While preferred embodiments of the present disclosure have been shown and described herein, it will be obvious to those skilled in the art that such embodiments are provided by way of example only. Numerous variations, changes, and substitutions will now occur to those skilled in the art without departing from the disclosure. It should be understood that various alternatives to the embodiments of the present disclosure may be employed in practicing the present disclosure. It is intended that the following claims define the scope of the present disclosure and that methods and structures within the scope of these claims and their equivalents be covered thereby.

1-126. (canceled)

127. A pharmaceutical composition for use in a method of reducing expression of a UBE3A protein in a mammalian cell having duplication, overexpression, or a gain-of-function mutation of a UBE3A gene that encodes the UBE3A protein, the method comprising contacting the pharmaceutical composition to the mammalian cell, wherein the pharmaceutical composition comprises an antisense oligomer or a vector encoding the antisense oligomer, and wherein the antisense oligomer reduces a level of a processed mRNA encoding the UBE3A protein in the mammalian cell.

128. The pharmaceutical composition for use according to claim 127, wherein the antisense oligomer comprises a polynucleotide sequence that is at least 80% complementary to at least 8 contiguous nucleotides of a sequence set forth in any one of SEQ ID NOs: 93-153.

129. The pharmaceutical composition for use according to claim 127, wherein the antisense oligomer comprises a sequence with at least 80%, at least 90%, or 100% identity to a sequence set forth in any one of SEQ ID NOs: 1-92.

130. The pharmaceutical composition for use according to claim 127, wherein the pharmaceutical composition comprises the antisense oligomer, and wherein the antisense oligomer comprises:
(a) a backbone modification, a modified sugar moiety or a combination thereof;
(b) a phosphorothioate linkage or a phosphorodiamidate linkage; and/or
(c) a phosphorodiamidate morpholino, a locked nucleic acid, a peptide nucleic acid, a 2′-O-methyl moiety, a 2′-Fluoro moiety, a 2′-O-methoxyethyl moiety, or a 2′-NMA moiety.

131. The pharmaceutical composition for use according to claim 127, wherein the pharmaceutical composition comprises the antisense oligomer, and wherein the antisense oligomer comprises at least one modified sugar moiety.

132. The pharmaceutical composition for use according to claim 127, wherein the pharmaceutical composition comprises the antisense oligomer, and wherein the antisense oligomer comprises three, four, five, or six 2′-O-methoxyethyl modified nucleosides at a 5′ end of the antisense oligomer; three, four, five, or six 2′-O-methoxyethyl modified nucleosides at a 3′ end of the antisense oligomer; and a phosphorothioate linkage between any two neighboring nucleosides of the antisense oligomer.

133. The pharmaceutical composition for use according to claim 127, wherein the pharmaceutical composition comprises the antisense oligomer, and wherein the antisense oligomer comprises:
a 5′ region consisting of three, four, five, or six linked nucleosides;
a central region consisting of eight, nine, ten, eleven, or twelve linked nucleosides; and
a 3′ region consisting of three, four, five, or six linked nucleosides;
wherein each of the three, four, five, or six linked nucleosides in the 5′ region and each of three, four, five, or six linked nucleosides in the 3′ region comprises a modified sugar moiety, and wherein each of the eight, nine, ten, eleven, or twelve linked nucleosides in the central region is a deoxyribonucleoside.

134. The pharmaceutical composition for use according to claim 127, wherein the antisense oligomer consists of from 8 to 50 nucleobases, 8 to 40 nucleobases, 8 to 35 nucleobases, 8 to 30 nucleobases, 8 to 25 nucleobases, 8 to 20 nucleobases, 8 to 15 nucleobases, 10 to 50 nucleobases, 10 to 40 nucleobases, 10 to 35 nucleobases, 10 to 30 nucleobases, 10 to 25 nucleobases, 10 to 20 nucleobases, 10 to 15 nucleobases, 12 to 50 nucleobases, 12 to 40 nucleobases, 12 to 35 nucleobases, 12 to 30 nucleobases, 12 to 25 nucleobases, 12 to 20 nucleobases, 12 to 15 nucleobases, 15 to 50 nucleobases, 15 to 40 nucleobases, 15 to 35 nucleobases, 15 to 30 nucleobases, 15 to 25 nucleobases, 15 to 20 nucleobases, 15 to 19 nucleobases, 15 to 18 nucleobases, 15 to 16 nucleobases, 16 to 20 nucleobases, 16 to 19 nucleobases, 16 to 18 nucleobases, 17 to 20 nucleobases, 17 to 19 nucleobases, or 18 to 20 nucleobases.

135. The pharmaceutical composition for use according to claim 127, wherein the pharmaceutical composition comprises the antisense oligomer, and wherein the antisense oligomer is a modified oligonucleotide comprising a sequence set forth in any one of SEQ ID NOs: 154-189 or 192-247.

136. The pharmaceutical composition for use according to claim 127, wherein the level of the processed mRNA encoding the UBE3A protein in the mammalian cell contacted with the antisense oligomer or the vector encoding the antisense oligomer is decreased by about 10% to about 99%, about 10% to about 95%, about 10% to about 90%, about 10% to about 80%, about 10% to about 70%, about 10% to about 60%, about 10% to about 50%, about 10% to about 40%, about 10% to about 30%, about 10% to about 20%, about 20% to about 90%, about 20% to about 80%, about 20% to about 70%, about 20% to about 60%, about 20% to about 50%, about 20% to about 40%, about 20% to about 30%, about 30% to about 80%, about 30% to about 70%, about 30% to about 60%, about 30% to about 50%, about 40% to about 70%, about 40% to about 60%, about 40% to about 50%, about 50% to about 99%, about 50% to about 95%, about 50% to about 90%, about 50% to about 80%, about 50% to about 70%, about 50% to about 60%, about 60% to about 99%, about 60% to about 95%, about 60% to about 90%, about 60% to about 80%, about 60% to about 70%, about 70% to about 99%, about 70% to about 95%, about 70% to about 90%, about 70% to about 80%, about 80% to about 99%, about 80% to about 95%, about 80% to about 90%, about 90% to about 99%, about 90% to about 95%, or about 95% to about 99%, as compared to an otherwise same mammalian cell not contacted with the antisense oligomer or the vector encoding the antisense oligomer.

137. The pharmaceutical composition for use according to claim 127, wherein the method reduces a level of the UBE3A protein in the mammalian cell, and
wherein the level of the UBE3A protein in the mammalian cell contacted with the antisense oligomer or the vector encoding the antisense oligomer is decreased by about 10% to about 99%, about 10% to about 95%, about 10% to about 90%, about 10% to about 80%, about 10% to about 70%, about 10% to about 60%, about 10% to about 50%, about 10% to about 40%, about 10% to about 30%, about 10% to about 20%, about 20% to about 90%, about 20% to about 80%, about 20% to about 70%, about 20% to about 60%, about 20% to about 50%, about 20% to about 40%, about 20% to about 30%, about 30% to about 80%, about 30% to about 70%, about 30% to about 60%, about 30% to about 50%, about 40% to about 70%, about 40% to about 60%, about 40% to about 50%, about 50% to about 99%, about 50% to about 95%, about 50% to about 90%, about 50% to about 80%, about 50% to about 70%, about 50% to about 60%, about 60% to about 99%, about 60% to about 95%, about 60% to about 90%, about 60% to about 80%, about 60% to about 70%, about 70% to about 99%, about 70% to about 95%, about 70% to about 90%, about 70% to about 80%, about 80% to about 99%, about 80% to about 95%, about 80% to about 90%, about 90% to about 99%, about 90% to about 95%, or about 95% to about 99%, as compared to an otherwise same mammalian cell not contacted with the antisense oligomer or the vector encoding the antisense oligomer.

138. The pharmaceutical composition for use according to claim 127, wherein the antisense oligomer reduces a level of the processed mRNA encoding the UBE3A protein in the mammalian cell contacted with the antisense oligomer or the vector encoding the antisense oligomer by at most about 75%, at most about 70%, at most about 60%, at most about 50%, at most about 40%, at most about 30%, or at most about 20%, as compared to an otherwise same mammalian cell not contacted with the antisense oligomer or the vector encoding the antisense oligomer.

139. The pharmaceutical composition for use according to claim 127, wherein the antisense oligomer reduces a level of the UBE3A protein in the mammalian cell contacted with the antisense oligomer or the vector encoding the antisense oligomer by at most about 75%, at most about 70%, at most about 60%, at most about 50%, at most about 40%, at most about 30%, or at most about 20%, as compared to an otherwise same mammalian cell not contacted with the antisense oligomer or the vector encoding the antisense oligomer.

140. The pharmaceutical composition for use according to claim 127, wherein the mammalian cell is ex vivo.

141. The pharmaceutical composition for use according to claim 127, wherein the mammalian cell has a duplication of a genomic region that encompasses the UBE3A gene encoding the UBE3A protein.

142. The pharmaceutical composition for use according to claim 127, wherein the mammalian cell is a human cell, and wherein the mammalian cell has a duplication of chromosome 15q11.2-q13.1, and/or
wherein the mammalian cell is obtained from a human subject suffering from Dup15q syndrome, or a progeny of a sample cell obtained from the human subject.

143. An antisense oligomer that comprises a sequence with at least 80% identity to the sequence set forth in any one of SEQ ID NOs: 1-92.

144. A pharmaceutical composition, comprising:
(a) a pharmaceutically acceptable excipient or carrier; and
(b) a therapeutic agent comprising the antisense oligomer of claim 143 or a vector encoding the antisense oligomer of claim 143, wherein the therapeutic agent is configured to reduce a level of a processed mRNA transcript encoding a UBE3A protein in a mammalian cell upon contact with the mammalian cell.

145. A method of treating a disease or condition in a subject in need thereof by reducing expression of a UBE3A protein in cells of the subject, comprising contacting to the cells of the subject the pharmaceutical composition comprising an antisense oligomer that comprises a sequence with at least 80% identity to the sequence set forth in any one of SEQ ID NOs: 1-92.

The application's sequence listing, which the Patent Office published only in electronic form, follows.

SEQUENCE LISTING (247 sequences)

SEQ ID NO: 1 - DNA, 20 bp, synthetic construct
  source 1..20: mol_type = other DNA
cgcttcattcggctagcttc

SEQ ID NO: 2 - DNA, 20 bp, synthetic construct
  source 1..20: mol_type = other DNA
attcggctagcttcaatgtc

SEQ ID NO: 3 - DNA, 20 bp, synthetic construct
  source 1..20: mol_type = other DNA
tcgcttcattcggctagctt

SEQ ID NO: 4 - DNA, 20 bp, synthetic construct
  source 1..20: mol_type = other DNA
gcttcattcggctagcttca

SEQ ID NO: 5 - DNA, 17 bp, synthetic construct
  source 1..17: mol_type = other DNA
tcggctagcttcaatgt

SEQ ID NO: 6 - DNA, 20 bp, synthetic construct
  source 1..20: mol_type = other DNA
cattcggctagcttcaatgt

SEQ ID NO: 7 - DNA, 18 bp, synthetic construct
  source 1..18: mol_type = other DNA
tcggctagcttcaatgtc

SEQ ID NO: 8 - DNA, 20 bp, synthetic construct
  source 1..20: mol_type = other DNA
ccggacaagtgcatcatcta

SEQ ID NO: 9 - DNA, 19 bp, synthetic construct
  source 1..19: mol_type = other DNA
ccggacaagtgcatcatct

SEQ ID NO: 10 - DNA, 20 bp, synthetic construct
  source 1..20: mol_type = other DNA
tcacattccacgttaggtga

SEQ ID NO: 11 - DNA, 19 bp, synthetic construct
  source 1..19: mol_type = other DNA
cttctggtctgaataagta

SEQ ID NO: 12 - DNA, 20 bp, synthetic construct
  source 1..20: mol_type = other DNA
cggacaagtgcatcatctat

SEQ ID NO: 13 - DNA, 20 bp, synthetic construct
  source 1..20: mol_type = other DNA
tgtacatgcgaattctattg

SEQ ID NO: 14 - DNA, 20 bp, synthetic construct
  source 1..20: mol_type = other DNA
tccatagcgatcatctctag

SEQ ID NO: 15 - DNA, 20 bp, synthetic construct
  source 1..20: mol_type = other DNA
ttccggcttccacatataag

SEQ ID NO: 16 - DNA, 18 bp, synthetic construct
  source 1..18: mol_type = other DNA
cattctccgaatctggtc

SEQ ID NO: 17 - DNA, 20 bp, synthetic construct
  source 1..20: mol_type = other DNA
ccttcctgttttcatttgta

SEQ ID NO: 18 - DNA, 20 bp, synthetic construct
  source 1..20: mol_type = other DNA
cctttctgtgtctgggccat

SEQ ID NO: 19 - DNA, 20 bp, synthetic construct
  source 1..20: mol_type = other DNA
ctcttacagatttttaacct

SEQ ID NO: 20 - DNA, 20 bp, synthetic construct
  source 1..20: mol_type = other DNA
taggtaacctttctgtgtct

SEQ ID NO: 21 - DNA, 20 bp, synthetic construct
  source 1..20: mol_type = other DNA
gtgaacataccaatatctgg

SEQ ID NO: 22 - DNA, 19 bp, synthetic construct
  source 1..19: mol_type = other DNA
gtatgagatgtaggtaacc

SEQ ID NO: 23 - DNA, 20 bp, synthetic construct
  source 1..20: mol_type = other DNA
acaggttgtcacaccagtct

SEQ ID NO: 24 - DNA, 20 bp, synthetic construct
  source 1..20: mol_type = other DNA
agtatgagatgtaggtaacc

SEQ ID NO: 25 - DNA, 20 bp, synthetic construct
  source 1..20: mol_type = other DNA
agctgtggccattcggtgac

SEQ ID NO: 26 - DNA, 19 bp, synthetic construct
  source 1..19: mol_type = other DNA
caagtatgagatgtaggta

SEQ ID NO: 27 - DNA, 20 bp, synthetic construct
  source 1..20: mol_type = other DNA
gataagtggttttcgacaat

SEQ ID NO: 28 - DNA, 20 bp, synthetic construct
  source 1..20: mol_type = other DNA
cggacaagtgcatcatctat

SEQ ID NO: 29 - DNA, 19 bp, synthetic construct
  source 1..19: mol_type = other DNA
ccggacaagtgcatcatct

SEQ ID NO: 30 - DNA, 19 bp, synthetic construct
  source 1..19: mol_type = other DNA
gtaacactttcacgcaaaa

SEQ ID NO: 31 - DNA, 18 bp, synthetic construct
  source 1..18: mol_type = other DNA
cattctccgaatctggtc

SEQ ID NO: 32 - DNA, 19 bp, synthetic construct
  source 1..19: mol_type = other DNA
ggacaagtgcatcatctat

SEQ ID NO: 33 - DNA, 20 bp, synthetic construct
  source 1..20: mol_type = other DNA
tccatagcgatcatctctag

SEQ ID NO: 34 - DNA, 18 bp, synthetic construct
  source 1..18: mol_type = other DNA
aagctgtggccattcggt

SEQ ID NO: 35 - DNA, 20 bp, synthetic construct
  source 1..20: mol_type = other DNA
cctttctgtgtctgggccat

SEQ ID NO: 36 - DNA, 20 bp, synthetic construct
  source 1..20: mol_type = other DNA
ccttcctgttttcatttgta

SEQ ID NO: 37 - DNA, 20 bp, synthetic construct
  source 1..20: mol_type = other DNA
acattcggctagcttcaatg

SEQ ID NO: 38 - DNA, 19 bp, synthetic construct
  source 1..19: mol_type = other DNA
ttcggctagcttcaatgtc

SEQ ID NO: 39 - DNA, 18 bp, synthetic construct
  source 1..18: mol_type = other DNA
ttcggctagcttcaatgt

SEQ ID NO: 40 - DNA, 19 bp, synthetic construct
  source 1..19: mol_type = other DNA
cttacattcggctagcttc

SEQ ID NO: 41 - DNA, 18 bp, synthetic construct
  source 1..18: mol_type = other DNA
cttacattcggctagctt

SEQ ID NO: 42 - DNA, 19 bp, synthetic construct
  source 1..19: mol_type = other DNA
attcggctagcttcaatgt

SEQ ID NO: 43 - DNA, 19 bp, synthetic construct
  source 1..19: mol_type = other DNA
taccatatttcgccaaact

SEQ ID NO: 44 - DNA, 20 bp, synthetic construct
  source 1..20: mol_type = other DNA
acctttctgtgtctgggcca

SEQ ID NO: 45 - DNA, 19 bp, synthetic construct
  source 1..19: mol_type = other DNA
tcacattccacgttaggtg

SEQ ID NO: 46 - DNA, 20 bp, synthetic construct
  source 1..20: mol_type = other DNA
cgtgtctttctgtgtctggg

SEQ ID NO: 47 - DNA, 17 bp, synthetic construct
  source 1..17: mol_type = other DNA
cttacattcggctagct

SEQ ID NO: 48 - DNA, 20 bp, synthetic construct
  source 1..20: mol_type = other DNA
tgtctttctgtgtctgggcc

SEQ ID NO: 49 - DNA, 20 bp, synthetic construct
  source 1..20: mol_type = other DNA
cttacccggcttccacatat

SEQ ID NO: 50 - DNA, 19 bp, synthetic construct
  source 1..19: mol_type = other DNA
ttacattcggctagcttca

SEQ ID NO: 51 - DNA, 19 bp, synthetic construct
  source 1..19: mol_type = other DNA
acattcggctagcttcaat

SEQ ID NO: 52 - DNA, 20 bp, synthetic construct
  source 1..20: mol_type = other DNA
tttgttgcaataggcttgac

SEQ ID NO: 53 - DNA, 20 bp, synthetic construct
  source 1..20: mol_type = other DNA
cataccatatttcgccaaac

SEQ ID NO: 54 - DNA, 20 bp, synthetic construct
  source 1..20: mol_type = other DNA
cttacattcggctagcttca

SEQ ID NO: 55 - DNA, 18 bp, synthetic construct
  source 1..18: mol_type = other DNA
tcacattccacgttaggt

SEQ ID NO: 56 - DNA, 20 bp, synthetic construct
  source 1..20: mol_type = other DNA
ataccatatttcgccaaact

SEQ ID NO: 57 - DNA, 20 bp, synthetic construct
  source 1..20: mol_type = other DNA
ccgtgtctttctgtgtctgg

SEQ ID NO: 58 - DNA, 20 bp, synthetic construct
  source 1..20: mol_type = other DNA
gtctttctgtgtctgggcca

SEQ ID NO: 59 - DNA, 20 bp, synthetic construct
  source 1..20: mol_type = other DNA
aacctttctgtgtctgggcc

SEQ ID NO: 60 - DNA, 20 bp, synthetic construct
  source 1..20: mol_type = other DNA
gtgtctttctgtgtctgggc

SEQ ID NO: 61 - DNA, 20 bp, synthetic construct
  source 1..20: mol_type = other DNA
gtaggtaacctttctgtgtc

SEQ ID NO: 62 - DNA, 20 bp, synthetic construct
  source 1..20: mol_type = other DNA
acattccacgttaggtgaca

SEQ ID NO: 63 - DNA, 19 bp, synthetic construct
  source 1..19: mol_type = other DNA
gttgcaataggcttgacta

SEQ ID NO: 64 - DNA, 19 bp, synthetic construct
  source 1..19: mol_type = other DNA
caggttgtcacaccagtct

SEQ ID NO: 65 - DNA, 20 bp, synthetic construct
  source 1..20: mol_type = other DNA
accatatttcgccaaacttc

SEQ ID NO: 66 - DNA, 20 bp, synthetic construct
  source 1..20: mol_type = other DNA
cttacccggacaagtgcatc

SEQ ID NO: 67 - DNA, 19 bp, synthetic construct
  source 1..19: mol_type = other DNA
ttacccggacaagtgcatc

SEQ ID NO: 68 - DNA, 18 bp, synthetic construct
  source 1..18: mol_type = other DNA
ggccattcggtgacatca

SEQ ID NO: 69 - DNA, 20 bp, synthetic construct
  source 1..20: mol_type = other DNA
tgatcttttacaagctgtgg

SEQ ID NO: 70 - DNA, 19 bp, synthetic construct
  source 1..19: mol_type = other DNA
agcaagtatgagatgtagg

SEQ ID NO: 71 - DNA, 19 bp, synthetic construct
  source 1..19: mol_type = other DNA
accatatttcgccaaactt

SEQ ID NO: 72 - DNA, 20 bp, synthetic construct
  source 1..20: mol_type = other DNA
ggtaacctttctgtgtctgg

SEQ ID NO: 73 - DNA, 19 bp, synthetic construct
  source 1..19: mol_type = other DNA
acaggttgtcacaccagtc

SEQ ID NO: 74 - DNA, 18 bp, synthetic construct
  source 1..18: mol_type = other DNA
gttgcaataggcttgact

SEQ ID NO: 75 - DNA, 20 bp, synthetic construct
  source 1..20: mol_type = other DNA
tgtgaacataccaatatctg

SEQ ID NO: 76 - DNA, 20 bp, synthetic construct
  source 1..20: mol_type = other DNA
actgtacatgcgaattctat

SEQ ID NO: 77 - DNA, 20 bp, synthetic construct
  source 1..20: mol_type = other DNA
ttacccggacaagtgcatca

SEQ ID NO: 78 - DNA, 20 bp, synthetic construct
  source 1..20: mol_type = other DNA
tgtaggtaacctttctgtgt

SEQ ID NO: 79 - DNA, 20 bp, synthetic construct
  source 1..20: mol_type = other DNA
tttcccagaactccctaatc

SEQ ID NO: 80 - DNA, 18 bp, synthetic construct
  source 1..18: mol_type = other DNA
caagtatgagatgtaggt

SEQ ID NO: 81 - DNA, 19 bp, synthetic construct
  source 1..19: mol_type = other DNA
aagctgtggccattcggtg

SEQ ID NO: 82 - DNA, 20 bp, synthetic construct
  source 1..20: mol_type = other DNA
ggccattcggtgacatcagg

SEQ ID NO: 83 - DNA, 17 bp, synthetic construct
  source 1..17: mol_type = other DNA
tgcaataggcttgacta

SEQ ID NO: 84 - DNA, 19 bp, synthetic construct
  source 1..19: mol_type = other DNA
ggccattcggtgacatcag

SEQ ID NO: 85 - DNA, 19 bp, synthetic construct
  source 1..19: mol_type = other DNA
agctgtggccattcggtga

SEQ ID NO: 86 - DNA, 19 bp, synthetic construct
  source 1..19: mol_type = other DNA
tcattctccgaatctggtc

SEQ ID NO: 87 - DNA, 20 bp, synthetic construct
  source 1..20: mol_type = other DNA
gtaacactttcacgcaaaaa

SEQ ID NO: 88 - DNA, 20 bp, synthetic construct
  source 1..20: mol_type = other DNA
aggtaacctttctgtgtctg

SEQ ID NO: 89 - DNA, 19 bp, synthetic construct
  source 1..19: mol_type = other DNA
tttgttgcaataggcttga

SEQ ID NO: 90 - DNA, 20 bp, synthetic construct
  source 1..20: mol_type = other DNA
atttcgccaaacttctgagg

SEQ ID NO: 91 - DNA, 19 bp, synthetic construct
  source 1..19: mol_type = other DNA
tctcaaggtaagctgagct

SEQ ID NO: 92 - DNA, 20 bp, synthetic construct
  source 1..20: mol_type = other DNA
ttcccagaactccctaatca

SEQ ID NO: 93 - DNA, 5319 bp, Homo sapiens
  source 1..5319: mol_type = genomic DNA
gctgcctgccgggatactcggcccgcccagccagtcctcccgtcttgcgccgcggccgcgagatccgtgtgtctcccaagatggtggcgctgggctcggggtgactacaggagacgacggggccttttcccttcgccaggacccgacacaccaggcttcgctcgctcgcgcacccctccgccgcgtagccatccgccagcgcgggcgcccgccatccgccgcctacttacgcttcacctctgccgacccggcgcgctcggctgcgggcggcggcgcctccttcggctcctcctcggaatagctcgcggcctgtagcccctggcaggagggcccctcagccccccggtgtggacaggcagcggcggctggcgacgaacgccgggatttcggcggccccggcgctccctttcccggcctcgttttccggataaggaagcgcgggtcccgcatgagccccggcggtggcggcagcgaaagagaacgaggcggtggcgggcggaggcggcgggcgagggcgactacgaccagtgaggcggccgccgcagcccaggcgcgggggcgacgacaggttaaaaatctgtaagagcctgattttagaattcaccagctcctcagaagtttggcgaaatatgagttattaagcctacgctcagatcaaggtagcagctagactggtgtgacaacctgtttttaatcagtgactcaaagctgtgatcaccctgatgtcaccgaatggccacagcttgtaaaagagagttacagtggaggtaaaaggagtggcttgcaggatggagaagctgcaccagtgttattggaaatcaggagaacctcagtctgacgacattgaagctagccgaatgaagcgagcagctgcaaagcatctaatagaacgctactaccaccagttaactgagggctgtggaaatgaagcctgcacgaatgagttttgtgcttcctgtccaacttttcttcgtatggataataatgcagcagctattaaagccctcgagctttataagattaatgcaaaactctgtgatcctcatccctccaagaaaggagcaagctcagcttaccttgagaactcgaaaggtgcccccaacaactcctgctctgagataaaaatgaacaagaaaggcgctagaattgattttaaagatgtgacttacttaacagaagagaaggtatatgaaattcttgaattatgtagagaaagagaggattattcccctttaatccgtgttattggaagagttttttctagtgctgaggcattggtacagagcttccggaaagttaaacaacacaccaaggaagaactgaaatctcttcaagcaaaagatgaagacaaagatgaagatgaaaaggaaaaagctgcatgttctgctgctgctatggaagaagactcagaagcatcttcctcaaggataggtgatagctcacagggagacaacaatttgcaaaaattaggccctgatgatgtgtctgtggatattgatgccattagaagggtctacaccagattgctctctaatgaaaaaattgaaactgcctttctcaatgcacttgtatatttgtcacctaacgtggaatgtgacttgacgtatcacaatgtatactctcgagatcctaattatctgaatttgttcattatcgtaatggagaatagaaatctccacagtcctgaatatctggaaatggctttgccattattttgcaaagcgatgagcaagctaccccttgcagcccaaggaaaactgatcagactgtggtctaaatacaatgcagaccagattcggagaatgatggagacatttcagcaacttattacttataaagtcataagcaatgaatttaacagtcgaaatctagtgaatgatgatgatgccattgttgctgcttcgaagtgcttgaaaatggtttactatgcaaatgtagtgggaggggaagtggacacaaatcacaatgaagaagatgatgaagagcccatccctgagtccagcgagctgacacttcaggaacttttgggagaagaaagaagaaacaagaaaggtcctcgagtggaccccctggaaactgaacttggtgttaaaaccctggattgtcgaaaaccacttatcccttttgaagagtttattaatgaaccactgaatgaggttctagaaatggataaagattatacttttttcaaagtagaaacagagaacaaattctcttttatgacatgtccctttatattgaatgctgtcacaaagaatttgggattatattatgacaatagaattcgcatgtacagtgaacgaagaatcactgttctctacagcttagttcaaggacagcagttgaatccatatttgagactcaaagttagacgtgaccatatcatagatgatgcacttgtccggctagagatgatcgctatggaaaatcctgcagacttgaagaagcagttgtatgtggaatttgaaggagaacaaggagttgatgagggaggtgtttccaaagaattttttcagctggttgtggaggaaatcttcaatccagatattggtatgttcacatacgatgaatctacaaaattgttttggtttaatccatcttcttttgaaactgagggtcagtttactctgattggcatagtactgggtctggctatttacaataactgtatactggatgtacattttcccatggttgtctacaggaagctaatggggaaaaaaggaacttttcgtgacttgggagactctcacccagttctatatcagagtttaaaagatttattggagtatgaagggaatgtggaagatgacatgatgatcactttccagatatcacagacagatctttttggtaacccaatgatgtatgatctaaaggaaaatggtgataaaattccaattacaaatgaaaacaggaaggaatttgtcaatctttattctgactacattctcaataaatcagtagaaaaacagttcaaggcttttcggagaggttttcatatggtgaccaatgaatctcccttaaagtacttattcagaccagaagaaattgaattgcttatatgtggaagccggaatctagatttccaagcactagaagaaactacagaatatgacggtggctataccagggactctgttctgattagggagttctgggaaatcgttcattcatttacagatgaacagaaaagactcttcttgcagtttacaacgggcacagacagagcacctgtgggaggactaggaaaattaaagatgattatagccaaaaatggcccagacacagaaaggttacctacatctcatacttgctttaatgtgcttttacttccggaatactcaagcaaagaaaaacttaaagagagattgttgaaggccatcacgtatgccaaaggatttggcatgctgtaaaacaaaacaaaacaaaataaaacaaaaaaaaggaaggaaaaaaaaagaaaaaatttaaaaaattttaaaaatataacgagggataaatttttggtggtgatagtgtcccagtacaaaaaggctgtaagatagtcaaccacagtagtcacctatgtctgtgcctcccttctttattggggacatgtgggctggaacagcagatttcagctacatatatgaacaaatcctttattattattataattatttttttgcgtgaaagtgttacatattctttcacttgtatgtacagagaggtttttctgaatatttattttaagggttaaatcacttttgcttgtgtttattactgcttgaggttgagccttttgagtatttaaaaaatatataccaacagaactactctcccaaggaaaatattgccaccatttgtagaccacgtaaccttcaagtatgtgctacttttttgtccctgtatctaactcaaatcaggaactgtattttttttaatgatttgcttttgaaacttgaagtcttgaaaacagtgtgatgcaattactgctgttctagcccccaaagagttttctgtgcaaaatcttgagaatcaatcaataaagaaagatggaaggaagggagaaattggaatgttttaactgcagccctcagaactttagtaacagcacaacaaattaaaaacaaaaacaactcatgccacagtatgtcgtcttcatgtgtcttgcaatgaactgtttcagtagccaatcctctttcttagtatatgaaaggacagggatttttgttcttgttgttctcgttgttgttttaagtttactggggaaagtgcatttggccaaatgaaatggtagtcaagcctattgcaacaaagttaggaagtttgttgtttgtttattataaacaaaaagcatgtgaaagtgcacttaagatagagtttttattaattacttacttattacctagattttaaatagacaatccaaagtctccccttcgtgttgccatcatcttgttgaatcagccattttatcgaggcacgtgatcagtgttgcaacataatgaaaaagatggctactgtgccttgtgttacttaatcatacagtaagctgacctggaaatgaatgaaactattactcctaagaattacattgtatagccccacagattaaatttaattaattaattcaaaacatgttaaacgttactttcatgtactatggaaaagtacaagtaggtttacattactgatttccagaagtaagtagtttcccctttcctagtcttctgtgtatgtgatgttgttaatttcttttattgcattataaaataaaaggattatgtatttttaactaaggtgagacattgatatatccttttgctacaagctatagctaatgtgctgagcttgtgccttggtgattgattgattgattgactgattgttttaactgattactgtagatcaacctgatgatttgtttgtttgaaattggcaggaaaaatgcagctttcaaatcattggggggagaaaaaggatgtctttcaggattattttaattaatttttttcataattgagacagaactgtttgttatgtaccataatgctaaataaaactgtggcacttttcaccataatttaatttagtggaaaaagaagacaatgctttccatattgtgataaggtaacatggggtttttctgggccagcctttagaacactgttagggtacatacgctaccttgatgaaagggaccttcgtgcaactgtagtcatcttaaaggcttctcatccactgtgcttcttaatgtgtaattaaagtgaggagaaattaaatactctgagggcgttttatataataaattcgtgaagaaatgtgtgctcttca

SEQ ID NO: 94 - DNA, 4863 bp, Homo sapiens
  source 1..4863: mol_type = genomic DNA
ggggcggggcgggacgtgcgaggcgtcgagatttgggcctcctaggagccaggctcttcgagccagccggggccccagacagggaagggcaggccctttccttcaaaggggagccctttctcggcgttttcaaggtttttggctctcttggggaagacatatttagccgtgtgcttggttaaaaatctgtaagagcctgattttagaattcaccagctcctcagaagtttggcgaaatatgagttattaagcctacgctcagatcaaggtagcagctagactggtgtgacaacctgtttttaatcagtgactcaaagctgtgatcaccctgatgtcaccgaatggccacagcttgtaaaagatcaggagaacctcagtctgacgacattgaagctagccgaatgaagcgagcagctgcaaagcatctaatagaacgctactaccaccagttaactgagggctgtggaaatgaagcctgcacgaatgagttttgtgcttcctgtccaacttttcttcgtatggataataatgcagcagctattaaagccctcgagctttataagattaatgcaaaactctgtgatcctcatccctccaagaaaggagcaagctcagcttaccttgagaactcgaaaggtgcccccaacaactcctgctctgagataaaaatgaacaagaaaggcgctagaattgattttaaagatgtgacttacttaacagaagagaaggtatatgaaattcttgaattatgtagagaaagagaggattattcccctttaatccgtgttattggaagagttttttctagtgctgaggcattggtacagagcttccggaaagttaaacaacacaccaaggaagaactgaaatctcttcaagcaaaagatgaagacaaagatgaagatgaaaaggaaaaagctgcatgttctgctgctgctatggaagaagactcagaagcatcttcctcaaggataggtgatagctcacagggagacaacaatttgcaaaaattaggccctgatgatgtgtctgtggatattgatgccattagaagggtctacaccagattgctctctaatgaaaaaattgaaactgcctttctcaatgcacttgtatatttgtcacctaacgtggaatgtgacttgacgtatcacaatgtatactctcgagatcctaattatctgaatttgttcattatcgtaatggagaatagaaatctccacagtcctgaatatctggaaatggctttgccattattttgcaaagcgatgagcaagctaccccttgcagcccaaggaaaactgatcagactgtggtctaaatacaatgcagaccagattcggagaatgatggagacatttcagcaacttattacttataaagtcataagcaatgaatttaacagtcgaaatctagtgaatgatgatgatgccattgttgctgcttcgaagtgcttgaaaatggtttactatgcaaatgtagtgggaggggaagtggacacaaatcacaatgaagaagatgatgaagagcccatccctgagtccagcgagctgacacttcaggaacttttgggagaagaaagaagaaacaagaaaggtcctcgagtggaccccctggaaactgaacttggtgttaaaaccctggattgtcgaaaaccacttatcccttttgaagagtttattaatgaaccactgaatgaggttctagaaatggataaagattatacttttttcaaagtagaaacagagaacaaattctcttttatgacatgtccctttatattgaatgctgtcacaaagaatttgggattatattatgacaatagaattcgcatgtacagtgaacgaagaatcactgttctctacagcttagttcaaggacagcagttgaatccatatttgagactcaaagttagacgtgaccatatcatagatgatgcacttgtccggctagagatgatcgctatggaaaatcctgcagacttgaagaagcagttgtatgtggaatttgaaggagaacaaggagttgatgagggaggtgtttccaaagaattttttcagctggttgtggaggaaatcttcaatccagatattggtatgttcacatacgatgaatctacaaaattgttttggtttaatccatcttcttttgaaactgagggtcagtttactctgattggcatagtactgggtctggctatttacaataactgtatactggatgtacattttcccatggttgtctacaggaagctaatggggaaaaaaggaacttttcgtgacttgggagactctcacccagttctatatcagagtttaaaagatttattggagtatgaagggaatgtggaagatgacatgatgatcactttccagatatcacagacagatctttttggtaacccaatgatgtatgatctaaaggaaaatggtgataaaattccaattacaaatgaaaacaggaaggaatttgtcaatctttattctgactacattctcaataaatcagtagaaaaacagttcaaggcttttcggagaggttttcatatggtgaccaatgaatctcccttaaagtacttattcagaccagaagaaattgaattgcttatatgtggaagccggaatctagatttccaagcactagaagaaactacagaatatgacggtggctataccagggactctgttctgattagggagttctgggaaatcgttcattcatttacagatgaacagaaaagactcttcttgcagtttacaacgggcacagacagagcacctgtgggaggactaggaaaattaaagatgattatagccaaaaatggcccagacacagaaaggttacctacatctcatacttgctttaatgtgcttttacttccggaatactcaagcaaagaaaaacttaaagagagattgttgaaggccatcacgtatgccaaaggatttggcatgctgtaaaacaaaacaaaacaaaataaaacaaaaaaaaggaaggaaaaaaaaagaaaaaatttaaaaaattttaaaaatataacgagggataaatttttggtggtgatagtgtcccagtacaaaaaggctgtaagatagtcaaccacagtagtcacctatgtctgtgcctcccttctttattggggacatgtgggctggaacagcagatttcagctacatatatgaacaaatcctttattattattataattatttttttgcgtgaaagtgttacatattctttcacttgtatgtacagagaggtttttctgaatatttattttaagggttaaatcacttttgcttgtgtttattactgcttgaggttgagccttttgagtatttaaaaaatatataccaacagaactactctcccaaggaaaatattgccaccatttgtagaccacgtaaccttcaagtatgtgctacttttttgtccctgtatctaactcaaatcaggaactgtattttttttaatgatttgcttttgaaacttgaagtcttgaaaacagtgtgatgcaattactgctgttctagcccccaaagagttttctgtgcaaaatcttgagaatcaatcaataaagaaagatggaaggaagggagaaattggaatgttttaactgcagccctcagaactttagtaacagcacaacaaattaaaaacaaaaacaactcatgccacagtatgtcgtcttcatgtgtcttgcaatgaactgtttcagtagccaatcctctttcttagtatatgaaaggacagggatttttgttcttgttgttctcgttgttgttttaagtttactggggaaagtgcatttggccaaatgaaatggtagtcaagcctattgcaacaaagttaggaagtttgttgtttgtttattataaacaaaaagcatgtgaaagtgcacttaagatagagtttttattaattacttacttattacctagattttaaatagacaatccaaagtctccccttcgtgttgccatcatcttgttgaatcagccattttatcgaggcacgtgatcagtgttgcaacataatgaaaaagatggctactgtgccttgtgttacttaatcatacagtaagctgacctggaaatgaatgaaactattactcctaagaattacattgtatagccccacagattaaatttaattaattaattcaaaacatgttaaacgttactttcatgtactatggaaaagtacaagtaggtttacattactgatttccagaagtaagtagtttcccctttcctagtcttctgtgtatgtgatgttgttaatttcttttattgcattataaaataaaaggattatgtatttttaactaaggtgagacattgatatatccttttgctacaagctatagctaatgtgctgagcttgtgccttggtgattgattgattgattgactgattgttttaactgattactgtagatcaacctgatgatttgtttgtttgaaattggcaggaaaaatgcagctttcaaatcattggggggagaaaaaggatgtctttcaggattattttaattaatttttttcataattgagacagaactgtttgttatgtaccataatgctaaataaaactgtggcacttttcaccataatttaatttagtggaaaaagaagacaatgctttccatattgtgataaggtaacatggggtttttctgggccagcctttagaacactgttagggtacatacgctaccttgatgaaagggaccttcgtgcaactgtagtcatcttaaaggcttctcatccactgtgcttcttaatgtgtaattaaagtgaggagaaattaaatactctgagggcgttttatataataaattcgtgaagaaatgtgtgctcttca

SEQ ID NO: 95 - DNA, 8864 bp, Homo sapiens
  source 1..8864: mol_type = genomic DNA
agtcctcccgtcttgcgccgcggccgcgagatccgtgtgtctcccaagatggtggcgctgggctcggggtgactacaggagacgacggggccttttcccttcgccaggacccgacacaccaggcttcgctcgctcgcgcacccctccgccgcgtagccatccgccagcgcgggcgcccgccatccgccgcctacttacgcttcacctctgccgacccggcgcgctcggctgcgggcggcggcgcctccttcggctcctcctcggaatagctcgcggcctgtagcccctggcaggagggcccctcagccccccggtgtggacaggcagcggcggctggcgacgaacgccgggatttcggcggccccggcgctccctttcccggcctcgttttccggataaggaagcgcgggtcccgcatgagccccggcggtggcggcagcgaaagagaacgaggcggtggcgggcggaggcggcgggcgagggcgactacgaccagtgaggcggccgccgcagcccaggcgcgggggcgacgacaggttaaaaatctgtaagagcctgattttagaattcaccagctcctcagaagtttggcgaaatatgagttattaagcctacgctcagatcaaggtagcagctagactggtgtgacaacctgtttttaatcagtgactcaaagctgtgatcaccctgatgtcaccgaatggccacagcttgtaaaagagagttacagtggaggtaaaaggagtggcttgcaggatggagaagctgcaccagtgttattggaactcttctgtctgggagatacaagtttggaagcaatcttggggtacttacccacaaggctggtggagaccagatcaggagaacctcagtctgacgacattgaagctagccgaatgaagcgagcagctgcaaagcatctaatagaacgctactaccaccagttaactgagggctgtggaaatgaagcctgcacgaatgagttttgtgcttcctgtccaacttttcttcgtatggataataatgcagcagctattaaagccctcgagctttataagattaatgcaaaactctgtgatcctcatccctccaagaaaggagcaagctcagcttaccttgagaactcgaaaggtgcccccaacaactcctgctctgagataaaaatgaacaagaaaggcgctagaattgattttaaagatgtgacttacttaacagaagagaaggtatatgaaattcttgaattatgtagagaaagagaggattattcccctttaatccgtgttattggaagagttttttctagtgctgaggcattggtacagagcttccggaaagttaaacaacacaccaaggaagaactgaaatctcttcaagcaaaagatgaagacaaagatgaagatgaaaaggaaaaagctgcatgttctgctgctgctatggaagaagactcagaagcatcttcctcaaggataggtgatagctcacagggagacaacaatttgcaaaaattaggccctgatgatgtgtctgtggatattgatgccattagaagggtctacaccagattgctctctaatgaaaaaattgaaactgcctttctcaatgcacttgtatatttgtcacctaacgtggaatgtgacttgacgtatcacaatgtatactctcgagatcctaattatctgaatttgttcattatcgtaatggagaatagaaatctccacagtcctgaatatctggaaatggctttgccattattttgcaaagcgatgagcaagctaccccttgcagcccaaggaaaactgatcagactgtggtctaaatacaatgcagaccagattcggagaatgatggagacatttcagcaacttattacttataaagtcataagcaatgaatttaacagtcgaaatctagtgaatgatgatgatgccattgttgctgcttcgaagtgcttgaaaatggtttactatgcaaatgtagtgggaggggaagtggacacaaatcacaatgaagaagatgatgaagagcccatccctgagtccagcgagctgacacttcaggaacttttgggagaagaaagaagaaacaagaaaggtcctcgagtggaccccctggaaactgaacttggtgttaaaaccctggattgtcgaaaaccacttatcccttttgaagagtttattaatgaaccactgaatgaggttctagaaatggataaagattatacttttttcaaagtagaaacagagaacaaattctcttttatgacatgtccctttatattgaatgctgtcacaaagaatttgggattatattatgacaatagaattcgcatgtacagtgaacgaagaatcactgttctctacagcttagttcaaggacagcagttgaatccatatttgagactcaaagttagacgtgaccatatcatagatgatgcacttgtccggctagagatgatcgctatggaaaatcctgcagacttgaagaagcagttgtatgtggaatttgaaggagaacaaggagttgatgagggaggtgtttccaaagaattttttcagctggttgtggaggaaatcttcaatccagatattggtatgttcacatacgatgaatctacaaaattgttttggtttaatccatcttcttttgaaactgagggtcagtttactctgattggcatagtactgggtctggctatttacaataactgtatactggatgtacattttcccatggttgtctacaggaagctaatggggaaaaaaggaacttttcgtgacttgggagactctcacccagttctatatcagagtttaaaagatttattggagtatgaagggaatgtggaagatgacatgatgatcactttccagatatcacagacagatctttttggtaacccaatgatgtatgatctaaaggaaaatggtgataaaattccaattacaaatgaaaacaggaaggaatttgtcaatctttattctgactacattctcaataaatcagtagaaaaacagttcaaggcttttcggagaggttttcatatggtgaccaatgaatctcccttaaagtacttattcagaccagaagaaattgaattgcttatatgtggaagccggaatctagatttccaagcactagaagaaactacagaatatgacggtggctataccagggactctgttctgattagggagttctgggaaatcgttcattcatttacagatgaacagaaaagactcttcttgcagtttacaacgggcacagacagagcacctgtgggaggactaggaaaattaaagatgattatagccaaaaatggcccagacacagaaaggttacctacatctcatacttgctttaatgtgcttttacttccggaatactcaagcaaagaaaaacttaaagagagattgttgaaggccatcacgtatgccaaaggatttggcatgctgtaaaacaaaacaaaacaaaataaaacaaaaaaaaggaaggaaaaaaaaagaaaaaatttaaaaaattttaaaaatataacgagggataaatttttggtggtgatagtgtcccagtacaaaaaggctgtaagatagtcaaccacagtagtcacctatgtctgtgcctcccttctttattggggacatgtgggctggaacagcagatttcagctacatatatgaacaaatcctttattattattataattatttttttgcgtgaaagtgttacatattctttcacttgtatgtacagagaggtttttctgaatatttattttaagggttaaatcacttttgcttgtgtttattactgcttgaggttgagccttttgagtatttaaaaaatatataccaacagaactactctcccaaggaaaatattgccaccatttgtagaccacgtaaccttcaagtatgtgctacttttttgtccctgtatctaactcaaatcaggaactgtattttttttaatgatttgcttttgaaacttgaagtcttgaaaacagtgtgatgcaattactgctgttctagcccccaaagagttttctgtgcaaaatcttgagaatcaatcaataaagaaagatggaaggaagggagaaattggaatgttttaactgcagccctcagaactttagtaacagcacaacaaattaaaaacaaaaacaactcatgccacagtatgtcgtcttcatgtgtcttgcaatgaactgtttcagtagccaatcctctttcttagtatatgaaaggacagggatttttgttcttgttgttctcgttgttgttttaagtttactggggaaagtgcatttggccaaatgaaatggtagtcaagcctattgcaacaaagttaggaagtttgttgtttgtttattataaacaaaaagcatgtgaaagtgcacttaagatagagtttttattaattacttacttattacctagattttaaatagacaatccaaagtctccccttcgtgttgccatcatcttgttgaatcagccattttatcgaggcacgtgatcagtgttgcaacataatgaaaaagatggctactgtgccttgtgttacttaatcatacagtaagctgacctggaaatgaatgaaactattactcctaagaattacattgtatagccccacagattaaatttaattaattaattcaaaacatgttaaacgttactttcatgtactatggaaaagtacaagtaggtttacattactgatttccagaagtaagtagtttcccctttcctagtcttctgtgtatgtgatgttgttaatttcttttattgcattataaaataaaaggattatgtatttttaactaaggtgagacattgatatatccttttgctacaagctatagctaatgtgctgagcttgtgccttggtgattgattgattgattgactgattgttttaactgattactgtagatcaacctgatgatttgtttgtttgaaattggcaggaaaaatgcagctttcaaatcattggggggagaaaaaggatgtctttcaggattattttaattaatttttttcataattgagacagaactgtttgttatgtaccataatgctaaataaaactgtggcacttttcaccataatttaatttagtggaaaaagaagacaatgctttccatattgtgataaggtaacatggggtttttctgggccagcctttagaacactgttagggtacatacgctaccttgatgaaagggaccttcgtgcaactgtagtcatcttaaaggcttctcatccactgtgcttcttaatgtgtaattaaagtgaggagaaattaaatactctgagggcgttttatataataaattcgtgaagaaatgtgtgctcttcagttctcaagttttattattatggtatttattaaagttctacaattgtaataacgtatccatatgacaagttttaaagtggtaattgaaataggttatcagatatagagttgttcacatcaagtagacttttaacagagtcagaatgaacctacccttaaaattttagagaaaaaaaatcgtcggttgcacagaatagctgctctagcttgcttaattatgccgggcatgttgtcactcctcttacttttgctgccttttcattactatttaatggaatgtccctgaacaataaggaagagcaaaacatagacattttgactacagtggatacttcctctaccccaaatgttatgttataaaagtactttttttgcccaggtactctattatatattttggttttctttgaattagacctcaatctccaggaagctctggagggaaaaaaaggaaccataaactaaagtaactggttttccaaataaatgtaaacttttttaaccttttattattatagaacatttcaaacatacataaaacatgaaaacagcctgcagccaaacttttctggaccttggcagctccagcaaatgagctggtcatcctaaccctggtttcctgagacaactacttttggggatgcttgcttgtatagggagatgatagatagatagatacatatcaaaaagaaacttgaaaaaggcttcgaacagaacttgccgatgttactcatccctcctcggtacagacattctgttagaacagatggttgtaatggggcagcatcactccctattcccattaaaaacatgaccattctgagatttcaggccccttcgaggaatttttctcaagaattccatacaaactgtcagaggaagaaatgtcgtcccaagactagtccctgtgtagtcttgatccctttacctgcttactgtaattttttttctctgactttccgccagtgtctaagggccatctgtacccctcccacccttccatgagccactgtataatccaaaaacacaccttccatttgctccctcacttgtctccttttacctcaacagtgttagtgtgtaaagaattgcctggggagggtagagggttttacaagtacagagtcccaagtcttttctcccctccccgttagtgggttggcatttattaataggcactgcaagattttgatgcaggtgtggggtagatatcactgtgaaaggctactaatgcatggtagtttcaccgaaagtacagtcttcaaggatccttataatctcctcattgccaaaatcagtaacatctataaccttgacaacaccctagcttgggctgttgcttctctggctacttgtttttccatcccagtttacccagattttagatggatactcctccaattctgcttaaagtccttacctgttcttgcccagttccctctagtcaacctcagtcactcccaaagattcttccccaatcccatatcttttgctcagacctctgtctctgggatttctttgttacctcatagtcagtagtcctaaaaacaaaattcttcatcttgcatctctatcgaccgaccattctttgtttctttttaagaaatgtaaccttcaccccaatcatcaaaatctctcattcctcaattgtcacaggttgtcacttctttccccctaaacctctcccatcattccttccttctttatactgcccttacaggtcctgatcctctgactcacccggacattcttagcagctgcctaatttcactccctgactctcatctccctcttccaatccttttcattgtgctagaacactatcttgctaattttaatatcctctgcattcagtgcctccacagattgccccctcactgacctttccaatttggccttgtgttacacactttcctcgctgcattcctacccagcatcttcacttgtcatatttctcaaatactcttcatgaccagatatttaaagtacctcatccatgaagacttcatcaacccccaaagtgcctccaatgcttccgtggtagcacagcataatggggtacatttcttagttgaacagtgaggagtcactgggattcttacagagtgtcttagggtctcctcttgatactctttccacatttcagttaaggaattttcttacatctttttttcttctaataacctttgcctggagtgtaagtaaattcatgatagagactgtcatttttaaaaaaaaaaacaaaccattttgcctttcacatgttattacctccatctttctgttatcttgtcagtgttgccacctaaatgattgaaaatgaccgagcatgcagtagaatgtagtgaagtttcctatttcatccattttttgcataagtgcattggtatctgtatatccatctgcccaagcaccagttgttgaaaagactattatttccccatgaatggtcctggtacccttgtcaaagaacagttgaccataaatataagactttctggattctcagtcttactccattgccctatatgtctgtcgttataccagcaccgcactgtcttgatggctgtagcttggtagtaagtttagatttgggatgtgcaagtcctccattttttttttttttttccccaaaatcattttgtctgttttgggtcccttgcattgcatatgaatttttatatgatcattgtgtcaattcctgcaaaacagctgggatcttgatagggatttagttgaattggtagataaatttgagaaataactgctattttaatggtgttaggttttctgttccatgactgtgggatgtctttgcatttgcttaggtctttatttcagtgatgttttagagatttcagtgtgcaagtcttgacgtctttaatttttttctaagtattttactgatgccactttaattatatgattattttctaatttttatttttgtattcatcactggtgttagaaataaaattaatttttgtatattgattttgtatattgtagcttttctaaaattctttttttgtcacttagtattttttgcatatgagatcatgcatctgtgaacagaaatacttttacttcttcctttccagtctagattcctattatttcattttcttgccttagtgtgctggctagcacctccagtacaatattggatagaagtgacaagagcagacatctttttcttgttcctgattttaaggggaaagcattcagtctttcaccattgagtatgatgttagctagctgtgggtttgcttcaagttgaggaaattcttttattaaacctagtttactgagtgttttttaatcaaaaaaaaaaaaaggaggggctgtgggttttgttaaatgcttcttctgtatcaagattttcatgttgttttgtcctttattaatatgttgtattaatggacttttgtatattgaattaactttgcattcctgggataatctcagttgtccatgctacataaaccttgttctatgctgctgga

SEQ ID NO: 96 - DNA, 8960 bp, Homo sapiens
  source 1..8960: mol_type = genomic DNA
agtcctcccgtcttgcgccgcggccgcgagatccgtgtgtctcccaagatggtggcgctgggctcggggtgactacaggagacgacggggccttttcccttcgccaggacccgacacaccaggcttcgctcgctcgcgcacccctccgccgcgtagccatccgccagcgcgggcgcccgccatccgccgcctacttacgcttcacctctgccgacccggcgcgctcggctgcgggcggcggcgcctccttcggctcctcctcggaatagctcgcggcctgtagcccctggcaggagggcccctcagccccccggtgtggacaggcagcggcggctggcgacgaacgccgggatttcggcggccccggcgctccctttcccggcctcgttttccggataaggaagcgcgggtcccgcatgagccccggcggtggcggcagcgaaagagaacgaggcggtggcgggcggaggcggcgggcgagggcgactacgaccagtgaggcggccgccgcagcccaggcgcgggggcgacgacagggtaaataccttaaattggaattactgggtcacatggttaaaaatctgtaagagcctgattttagaattcaccagctcctcagaagtttggcgaaatatgagttattaagcctacgctcagatcaaggtagcagctagactggtgtgacaacctgtttttaatcagtgactcaaagctgtgatcaccctgatgtcaccgaatggccacagcttgtaaaagtgccagcaggtttattttttgttttgcaagccagctctgcctccttacagtatgacatctgatgctggagggtcgcactttcaaaaatgagtcagctggtacatggggttatcatcaatttttagctcttctgtctgggagatacaagtttggaagcaatcttggggtacttacccacaaggctggtggagaccagatcaggagaacctcagtctgacgacattgaagctagccgaatgaagcgagcagctgcaaagcatctaatagaacgctactaccaccagttaactgagggctgtggaaatgaagcctgcacgaatgagttttgtgcttcctgtccaacttttcttcgtatggataataatgcagcagctattaaagccctcgagctttataagattaatgcaaaactctgtgatcctcatccctccaagaaaggagcaagctcagcttaccttgagaactcgaaaggtgcccccaacaactcctgctctgagataaaaatgaacaagaaaggcgctagaattgattttaaagatgtgacttacttaacagaagagaaggtatatgaaattcttgaattatgtagagaaagagaggattattcccctttaatccgtgttattggaagagttttttctagtgctgaggcattggtacagagcttccggaaagttaaacaacacaccaaggaagaactgaaatctcttcaagcaaaagatgaagacaaagatgaagatgaaaaggaaaaagctgcatgttctgctgctgctatggaagaagactcagaagcatcttcctcaaggataggtgatagctcacagggagacaacaatttgcaaaaattaggccctgatgatgtgtctgtggatattgatgccattagaagggtctacaccagattgctctctaatgaaaaaattgaaactgcctttctcaatgcacttgtatatttgtcacctaacgtggaatgtgacttgacgtatcacaatgtatactctcgagatcctaattatctgaatttgttcattatcgtaatggagaatagaaatctccacagtcctgaatatctggaaatggctttgccattattttgcaaagcgatgagcaagctaccccttgcagcccaaggaaaactgatcagactgtggtctaaatacaatgcagaccagattcggagaatgatggagacatttcagcaacttattacttataaagtcataagcaatgaatttaacagtcgaaatctagtgaatgatgatgatgccattgttgctgcttcgaagtgcttgaaaatggtttactatgcaaatgtagtgggaggggaagtggacacaaatcacaatgaagaagatgatgaagagcccatccctgagtccagcgagctgacacttcaggaacttttgggagaagaaagaagaaacaagaaaggtcctcgagtggaccccctggaaactgaacttggtgttaaaaccctggattgtcgaaaaccacttatcccttttgaagagtttattaatgaaccactgaatgaggttctagaaatggataaagattatacttttttcaaagtagaaacagagaacaaattctcttttatgacatgtccctttatattgaatgctgtcacaaagaatttgggattatattatgacaatagaattcgcatgtacagtgaacgaagaatcactgttctctacagcttagttcaaggacagcagttgaatccatatttgagactcaaagttagacgtgaccatatcatagatgatgcacttgtccggctagagatgatcgctatggaaaatcctgcagacttgaagaagcagttgtatgtggaatttgaaggagaacaaggagttgatgagggaggtgtttccaaagaattttttcagctggttgtggaggaaatcttcaatccagatattggtatgttcacatacgatgaatctacaaaattgttttggtttaatccatcttcttttgaaactgagggtcagtttactctgattggcatagtactgggtctggctatttacaataactgtatactggatgtacattttcccatggttgtctacaggaagctaatggggaaaaaaggaacttttcgtgacttgggagactctcacccagttctatatcagagtttaaaagatttattggagtatgaagggaatgtggaagatgacatgatgatcactttccagatatcacagacagatctttttggtaacccaatgatgtatgatctaaaggaaaatggtgataaaattccaattacaaatgaaaacaggaaggaatttgtcaatctttattctgactacattctcaataaatcagtagaaaaacagttcaaggcttttcggagaggttttcatatggtgaccaatgaatctcccttaaagtacttattcagaccagaagaaattgaattgcttatatgtggaagccggaatctagatttccaagcactagaagaaactacagaatatgacggtggctataccagggactctgttctgattagggagttctgggaaatcgttcattcatttacagatgaacagaaaagactcttcttgcagtttacaacgggcacagacagagcacctgtgggaggactaggaaaattaaagatgattatagccaaaaatggcccagacacagaaaggttacctacatctcatacttgctttaatgtgcttttacttccggaatactcaagcaaagaaaaacttaaagagagattgttgaaggccatcacgtatgccaaaggatttggcatgctgtaaaacaaaacaaaacaaaataaaacaaaaaaaaggaaggaaaaaaaaagaaaaaatttaaaaaattttaaaaatataacgagggataaatttttggtggtgatagtgtcccagtacaaaaaggctgtaagatagtcaaccacagtagtcacctatgtctgtgcctcccttctttattggggacatgtgggctggaacagcagatttcagctacatatatgaacaaatcctttattattattataattatttttttgcgtgaaagtgttacatattctttcacttgtatgtacagagaggtttttctgaatatttattttaagggttaaatcacttttgcttgtgtttattactgcttgaggttgagccttttgagtatttaaaaaatatataccaacagaactactctcccaaggaaaatattgccaccatttgtagaccacgtaaccttcaagtatgtgctacttttttgtccctgtatctaactcaaatcaggaactgtattttttttaatgatttgcttttgaaacttgaagtcttgaaaacagtgtgatgcaattactgctgttctagcccccaaagagttttctgtgcaaaatcttgagaatcaatcaataaagaaagatggaaggaagggagaaattggaatgttttaactgcagccctcagaactttagtaacagcacaacaaattaaaaacaaaaacaactcatgccacagtatgtcgtcttcatgtgtcttgcaatgaactgtttcagtagccaatcctctttcttagtatatgaaaggacagggatttttgttcttgttgttctcgttgttgttttaagtttactggggaaagtgcatttggccaaatgaaatggtagtcaagcctattgcaacaaagttaggaagtttgttgtttgtttattataaacaaaaagcatgtgaaagtgcacttaagatagagtttttattaattacttacttattacctagattttaaatagacaatccaaagtctccccttcgtgttgccatcatcttgttgaatcagccattttatcgaggcacgtgatcagtgttgcaacataatgaaaaagatggctactgtgccttgtgttacttaatcatacagtaagctgacctggaaatgaatgaaactattactcctaagaattacattgtatagccccacagattaaatttaattaattaattcaaaacatgttaaacgttactttcatgtactatggaaaagtacaagtaggtttacattactgatttccagaagtaagtagtttcccctttcctagtcttctgtgtatgtgatgttgttaatttcttttattgcattataaaataaaaggattatgtatttttaactaaggtgagacattgatatatccttttgctacaagctatagctaatgtgctgagcttgtgccttggtgattgattgattgattgactgattgttttaactgattactgtagatcaacctgatgatttgtttgtttgaaattggcaggaaaaatgcagctttcaaatcattggggggagaaaaaggatgtctttcaggattattttaattaatttttttcataattgagacagaactgtttgttatgtaccataatgctaaataaaactgtggcacttttcaccataatttaatttagtggaaaaagaagacaatgctttccatattgtgataaggtaacatggggtttttctgggccagcctttagaacactgttagggtacatacgctaccttgatgaaagggaccttcgtgcaactgtagtcatcttaaaggcttctcatccactgtgcttcttaatgtgtaattaaagtgaggagaaattaaatactctgagggcgttttatataataaattcgtgaagaaatgtgtgctcttcagttctcaagttttattattatggtatttattaaagttctacaattgtaataacgtatccatatgacaagttttaaagtggtaattgaaataggttatcagatatagagttgttcacatcaagtagacttttaacagagtcagaatgaacctacccttaaaattttagagaaaaaaaatcgtcggttgcacagaatagctgctctagcttgcttaattatgccgggcatgttgtcactcctcttacttttgctgccttttcattactatttaatggaatgtccctgaacaataaggaagagcaaaacatagacattttgactacagtggatacttcctctaccccaaatgttatgttataaaagtactttttttgcccaggtactctattatatattttggttttctttgaattagacctcaatctccaggaagctctggagggaaaaaaaggaaccataaactaaagtaactggttttccaaataaatgtaaacttttttaaccttttattattatagaacatttcaaacatacataaaacatgaaaacagcctgcagccaaacttttctggaccttggcagctccagcaaatgagctggtcatcctaaccctggtttcctgagacaactacttttggggatgcttgcttgtatagggagatgatagatagatagatacatatcaaaaagaaacttgaaaaaggcttcgaacagaacttgccgatgttactcatccctcctcggtacagacattctgttagaacagatggttgtaatggggcagcatcactccctattcccattaaaaacatgaccattctgagatttcaggccccttcgaggaatttttctcaagaattccatacaaactgtcagaggaagaaatgtcgtcccaagactagtccctgtgtagtcttgatccctttacctgcttactgtaattttttttctctgactttccgccagtgtctaagggccatctgtacccctcccacccttccatgagccactgtataatccaaaaacacaccttccatttgctccctcacttgtctccttttacctcaacagtgttagtgtgtaaagaattgcctggggagggtagagggttttacaagtacagagtcccaagtcttttctcccctccccgttagtgggttggcatttattaataggcactgcaagattttgatgcaggtgtggggtagatatcactgtgaaaggctactaatgcatggtagtttcaccgaaagtacagtcttcaaggatccttataatctcctcattgccaaaatcagtaacatctataaccttgacaacaccctagcttgggctgttgcttctctggctacttgtttttccatcccagtttacccagattttagatggatactcctccaattctgcttaaagtccttacctgttcttgcccagttccctctagtcaacctcagtcactcccaaagattcttccccaatcccatatcttttgctcagacctctgtctctgggatttctttgttacctcatagtcagtagtcctaaaaacaaaattcttcatcttgcatctctatcgaccgaccattctttgtttctttttaagaaatgtaaccttcaccccaatcatcaaaatctctcattcctcaattgtcacaggttgtcacttctttccccctaaacctctcccatcattccttccttctttatactgcccttacaggtcctgatcctctgactcacccggacattcttagcagctgcctaatttcactccctgactctcatctccctcttccaatccttttcattgtgctagaacactatcttgctaattttaatatcctctgcattcagtgcctccacagattgccccctcactgacctttccaatttggccttgtgttacacactttcctcgctgcattcctacccagcatcttcacttgtcatatttctcaaatactcttcatgaccagatatttaaagtacctcatccatgaagacttcatcaacccccaaagtgcctccaatgcttccgtggtagcacagcataatggggtacatttcttagttgaacagtgaggagtcactgggattcttacagagtgtcttagggtctcctcttgatactctttccacatttcagttaaggaattttcttacatctttttttcttctaataacctttgcctggagtgtaagtaaattcatgatagagactgtcatttttaaaaaaaaaaacaaaccattttgcctttcacatgttattacctccatctttctgttatcttgtcagtgttgccacctaaatgattgaaaatgaccgagcatgcagtagaatgtagtgaagtttcctatttcatccattttttgcataagtgcattggtatctgtatatccatctgcccaagcaccagttgttgaaaagactattatttccccatgaatggtcctggtacccttgtcaaagaacagttgaccataaatataagactttctggattctcagtcttactccattgccctatatgtctgtcgttataccagcaccgcactgtcttgatggctgtagcttggtagtaagtttagatttgggatgtgcaagtcctccattttttttttttttttccccaaaatcattttgtctgttttgggtcccttgcattgcatatgaatttttatatgatcattgtgtcaattcctgcaaaacagctgggatcttgatagggatttagttgaattggtagataaatttgagaaataactgctattttaatggtgttaggttttctgttccatgactgtgggatgtctttgcatttgcttaggtctttatttcagtgatgttttagagatttcagtgtgcaagtcttgacgtctttaatttttttctaagtattttactgatgccactttaattatatgattattttctaatttttatttttgtattcatcactggtgttagaaataaaattaatttttgtatattgattttgtatattgtagcttttctaaaattctttttttgtcacttagtattttttgcatatgagatcatgcatctgtgaacagaaatacttttacttcttcctttccagtctagattcctattatttcattttcttgccttagtgtgctggctagcacctccagtacaatattggatagaagtgacaagagcagacatctttttcttgttcctgattttaaggggaaagcattcagtctttcaccattgagtatgatgttagctagctgtgggtttgcttcaagttgaggaaattcttttattaaacctagtttactgagtgttttttaatcaaaaaaaaaaaaaggaggggctgtgggttttgttaaatgcttcttctgtatcaagattttcatgttgttttgtcctttattaatatgttgtattaatggacttttgtatattgaattaactttgcattcctgggataatctcagttgtccatgctacataaaccttgttctatgctgctgga

SEQ ID NO: 97 - DNA, 8924 bp, Homo sapiens
  source 1..8924: mol_type = genomic DNA
agtcctcccgtcttgcgccgcggccgcgagatccgtgtgtctcccaagatggtggcgctgggctcggggtgactacaggagacgacggggccttttcccttcgccaggacccgacacaccaggcttcgctcgctcgcgcacccctccgccgcgtagccatccgccagcgcgggcgcccgccatccgccgcctacttacgcttcacctctgccgacccggcgcgctcggctgcgggcggcggcgcctccttcggctcctcctcggaatagctcgcggcctgtagcccctggcaggagggcccctcagccccccggtgtggacaggcagcggcggctggcgacgaacgccgggatttcggcggccccggcgctccctttcccggcctcgttttccggataaggaagcgcgggtcccgcatgagccccggcggtggcggcagcgaaagagaacgaggcggtggcgggcggaggcggcgggcgagggcgactacgaccagtgaggcggccgccgcagcccaggcgcgggggcgacgacaggttaaaaatctgtaagagcctgattttagaattcaccagctcctcagaagtttggcgaaatatgagttattaagcctacgctcagatcaaggtagcagctagactggtgtgacaacctgtttttaatcagtgactcaaagctgtgatcaccctgatgtcaccgaatggccacagcttgtaaaagtgccagcaggtttattttttgttttgcaagccagctctgcctccttacagtatgacatctgatgctggagggtcgcactttcaaaaatgagtcagctggtacatggggttatcatcaatttttagctcttctgtctgggagatacaagtttggaagcaatcttggggtacttacccacaaggctggtggagaccagatcaggagaacctcagtctgacgacattgaagctagccgaatgaagcgagcagctgcaaagcatctaatagaacgctactaccaccagttaactgagggctgtggaaatgaagcctgcacgaatgagttttgtgcttcctgtccaacttttcttcgtatggataataatgcagcagctattaaagccctcgagctttataagattaatgcaaaactctgtgatcctcatccctccaagaaaggagcaagctcagcttaccttgagaactcgaaaggtgcccccaacaactcctgctctgagataaaaatgaacaagaaaggcgctagaattgattttaaagatgtgacttacttaacagaagagaaggtatatgaaattcttgaattatgtagagaaagagaggattattcccctttaatccgtgttattggaagagttttttctagtgctgaggcattggtacagagcttccggaaagttaaacaacacaccaaggaagaactgaaatctcttcaagcaaaagatgaagacaaagatgaagatgaaaaggaaaaagctgcatgttctgctgctgctatggaagaagactcagaagcatcttcctcaaggataggtgatagctcacagggagacaacaatttgcaaaaattaggccctgatgatgtgtctgtggatattgatgccattagaagggtctacaccagattgctctctaatgaaaaaattgaaactgcctttctcaatgcacttgtatatttgtcacctaacgtggaatgtgacttgacgtatcacaatgtatactctcgagatcctaattatctgaatttgttcattatcgtaatggagaatagaaatctccacagtcctgaatatctggaaatggctttgccattattttgcaaagcgatgagcaagctaccccttgcagcccaaggaaaactgatcagactgtggtctaaatacaatgcagaccagattcggagaatgatggagacatttcagcaacttattacttataaagtcataagcaatgaatttaacagtcgaaatctagtgaatgatgatgatgccattgttgctgcttcgaagtgcttgaaaatggtttactatgcaaatgtagtgggaggggaagtggacacaaatcacaatgaagaagatgatgaagagcccatccctgagtccagcgagctgacacttcaggaacttttgggagaagaaagaagaaacaagaaaggtcctcgagtggaccccctggaaactgaacttggtgttaaaaccctggattgtcgaaaaccacttatcccttttgaagagtttattaatgaaccactgaatgaggttctagaaatggataaagattatacttttttcaaagtagaaacagagaacaaattctcttttatgacatgtccctttatattgaatgctgtcacaaagaatttgggattatattatgacaatagaattcgcatgtacagtgaacgaagaatcactgttctctacagcttagttcaaggacagcagttgaatccatatttgagactcaaagttagacgtgaccatatcatagatgatgcacttgtccggctagagatgatcgctatggaaaatcctgcagacttgaagaagcagttgtatgtggaatttgaaggagaacaaggagttgatgagggaggtgtttccaaagaattttttcagctggttgtggaggaaatcttcaatccagatattggtatgttcacatacgatgaatctacaaaattgttttggtttaatccatcttcttttgaaactgagggtcagtttactctgattggcatagtactgggtctggctatttacaataactgtatactggatgtacattttcccatggttgtctacaggaagctaatggggaaaaaaggaacttttcgtgacttgggagactctcacccagttctatatcagagtttaaaagatttattggagtatgaagggaatgtggaagatgacatgatgatcactttccagatatcacagacagatctttttggtaacccaatgatgtatgatctaaaggaaaatggtgataaaattccaattacaaatgaaaacaggaaggaatttgtcaatctttattctgactacattctcaataaatcagtagaaaaacagttcaaggcttttcggagaggttttcatatggtgaccaatgaatctcccttaaagtacttattcagaccagaagaaattgaattgcttatatgtggaagccggaatctagatttccaagcactagaagaaactacagaatatgacggtggctataccagggactctgttctgattagggagttctgggaaatcgttcattcatttacagatgaacagaaaagactcttcttgcagtttacaacgggcacagacagagcacctgtgggaggactaggaaaattaaagatgattatagccaaaaatggcccagacacagaaaggttacctacatctcatacttgctttaatgtgcttttacttccggaatactcaagcaaagaaaaacttaaagagagattgttgaaggccatcacgtatgccaaaggatttggcatgctgtaaaacaaaacaaaacaaaataaaacaaaaaaaaggaaggaaaaaaaaagaaaaaatttaaaaaattttaaaaatataacgagggataaatttttggtggtgatagtgtcccagtacaaaaaggctgtaagatagtcaaccacagtagtcacctatgtctgtgcctcccttctttattggggacatgtgggctggaacagcagatttcagctacatatatgaacaaatcctttattattattataattatttttttgcgtgaaagtgttacatattctttcacttgtatgtacagagaggtttttctgaatatttattttaagggttaaatcacttttgcttgtgtttattactgcttgaggttgagccttttgagtatttaaaaaatatataccaacagaactactctcccaaggaaaatattgccaccatttgtagaccacgtaaccttcaagtatgtgctacttttttgtccctgtatctaactcaaatcaggaactgtattttttttaatgatttgcttttgaaacttgaagtcttgaaaacagtgtgatgcaattactgctgttctagcccccaaagagttttctgtgcaaaatcttgagaatcaatcaataaagaaagatggaaggaagggagaaattggaatgttttaactgcagccctcagaactttagtaacagcacaacaaattaaaaacaaaaacaactcatgccacagtatgtcgtcttcatgtgtcttgcaatgaactgtttcagtagccaatcctctttcttagtatatgaaaggacagggatttttgttcttgttgttctcgttgttgttttaagtttactggggaaagtgcatttggccaaatgaaatggtagtcaagcctattgcaacaaagttaggaagtttgttgtttgtttattataaacaaaaagcatgtgaaagtgcacttaagatagagtttttattaattacttacttattacctagattttaaatagacaatccaaagtctccccttcgtgttgccatcatcttgttgaatcagccattttatcgaggcacgtgatcagtgttgcaacataatgaaaaagatggctactgtgccttgtgttacttaatcatacagtaagctgacctggaaatgaatgaaactattactcctaagaattacattgtatagccccacagattaaatttaattaattaattcaaaacatgttaaacgttactttcatgtactatggaaaagtacaagtaggtttacattactgatttccagaagtaagtagtttcccctttcctagtcttctgtgtatgtgatgttgttaatttcttttattgcattataaaataaaaggattatgtatttttaactaaggtgagacattgatatatccttttgctacaagctatagctaatgtgctgagcttgtgccttggtgattgattgattgattgactgattgttttaactgattactgtagatcaacctgatgatttgtttgtttgaaattggcaggaaaaatgcagctttcaaatcattggggggagaaaaaggatgtctttcaggattattttaattaatttttttcataattgagacagaactgtttgttatgtaccataatgctaaataaaactgtggcacttttcaccataatttaatttagtggaaaaagaagacaatgctttccatattgtgataaggtaacatggggtttttctgggccagcctttagaacactgttagggtacatacgctaccttgatgaaagggaccttcgtgcaactgtagtcatcttaaaggcttctcatccactgtgcttcttaatgtgtaattaaagtgaggagaaattaaatactctgagggcgttttatataataaattcgtgaagaaatgtgtgctcttcagttctcaagttttattattatggtatttattaaagttctacaattgtaataacgtatccatatgacaagttttaaagtggtaattgaaataggttatcagatatagagttgttcacatcaagtagacttttaacagagtcagaatgaacctacccttaaaattttagagaaaaaaaatcgtcggttgcacagaatagctgctctagcttgcttaattatgccgggcatgttgtcactcctcttacttttgctgccttttcattactatttaatggaatgtccctgaacaataaggaagagcaaaacatagacattttgactacagtggatacttcctctaccccaaatgttatgttataaaagtactttttttgcccaggtactctattatatattttggttttctttgaattagacctcaatctccaggaagctctggagggaaaaaaaggaaccataaactaaagtaactggttttccaaataaatgtaaacttttttaaccttttattattatagaacatttcaaacatacataaaacatgaaaacagcctgcagccaaacttttctggaccttggcagctccagcaaatgagctggtcatcctaaccctggtttcctgagacaactacttttggggatgcttgcttgtatagggagatgatagatagatagatacatatcaaaaagaaacttgaaaaaggcttcgaacagaacttgccgatgttactcatccctcctcggtacagacattctgttagaacagatggttgtaatggggcagcatcactccctattcccattaaaaacatgaccattctgagatttcaggccccttcgaggaatttttctcaagaattccatacaaactgtcagaggaagaaatgtcgtcccaagactagtccctgtgtagtcttgatccctttacctgcttactgtaattttttttctctgactttccgccagtgtctaagggccatctgtacccctcccacccttccatgagccactgtataatccaaaaacacaccttccatttgctccctcacttgtctccttttacctcaacagtgttagtgtgtaaagaattgcctggggagggtagagggttttacaagtacagagtcccaagtcttttctcccctccccgttagtgggttggcatttattaataggcactgcaagattttgatgcaggtgtggggtagatatcactgtgaaaggctactaatgcatggtagtttcaccgaaagtacagtcttcaaggatccttataatctcctcattgccaaaatcagtaacatctataaccttgacaacaccctagcttgggctgttgcttctctggctacttgtttttccatcccagtttacccagattttagatggatactcctccaattctgcttaaagtccttacctgttcttgcccagttccctctagtcaacctcagtcactcccaaagattcttccccaatcccatatcttttgctcagacctctgtctctgggatttctttgttacctcatagtcagtagtcctaaaaacaaaattcttcatcttgcatctctatcgaccgaccattctttgtttctttttaagaaatgtaaccttcaccccaatcatcaaaatctctcattcctcaattgtcacaggttgtcacttctttccccctaaacctctcccatcattccttccttctttatactgcccttacaggtcctgatcctctgactcacccggacattcttagcagctgcctaatttcactccctgactctcatctccctcttccaatccttttcattgtgctagaacactatcttgctaattttaatatcctctgcattcagtgcctccacagattgccccctcactgacctttccaatttggccttgtgttacacactttcctcgctgcattcctacccagcatcttcacttgtcatatttctcaaatactcttcatgaccagatatttaaagtacctcatccatgaagacttcatcaacccccaaagtgcctccaatgcttccgtggtagcacagcataatggggtacatttcttagttgaacagtgaggagtcactgggattcttacagagtgtcttagggtctcctcttgatactctttccacatttcagttaaggaattttcttacatctttttttcttctaataacctttgcctggagtgtaagtaaattcatgatagagactgtcatttttaaaaaaaaaaacaaaccattttgcctttcacatgttattacctccatctttctgttatcttgtcagtgttgccacctaaatgattgaaaatgaccgagcatgcagtagaatgtagtgaagtttcctatttcatccattttttgcataagtgcattggtatctgtatatccatctgcccaagcaccagttgttgaaaagactattatttccccatgaatggtcctggtacccttgtcaaagaacagttgaccataaatataagactttctggattctcagtcttactccattgccctatatgtctgtcgttataccagcaccgcactgtcttgatggctgtagcttggtagtaagtttagatttgggatgtgcaagtcctccattttttttttttttttccccaaaatcattttgtctgttttgggtcccttgcattgcatatgaatttttatatgatcattgtgtcaattcctgcaaaacagctgggatcttgatagggatttagttgaattggtagataaatttgagaaataactgctattttaatggtgttaggttttctgttccatgactgtgggatgtctttgcatttgcttaggtctttatttcagtgatgttttagagatttcagtgtgcaagtcttgacgtctttaatttttttctaagtattttactgatgccactttaattatatgattattttctaatttttatttttgtattcatcactggtgttagaaataaaattaatttttgtatattgattttgtatattgtagcttttctaaaattctttttttgtcacttagtattttttgcatatgagatcatgcatctgtgaacagaaatacttttacttcttcctttccagtctagattcctattatttcattttcttgccttagtgtgctggctagcacctccagtacaatattggatagaagtgacaagagcagacatctttttcttgttcctgattttaaggggaaagcattcagtctttcaccattgagtatgatgttagctagctgtgggtttgcttcaagttgaggaaattcttttattaaacctagtttactgagtgttttttaatcaaaaaaaaaaaaaggaggggctgtgggttttgttaaatgcttcttctgtatcaagattttcatgttgttttgtcctttattaatatgttgtattaatggacttttgtatattgaattaactttgcattcctgggataatctcagttgtccatgctacataaaccttgttctatgctgctgga

SEQ ID NO: 98 - DNA, 9037 bp, Homo sapiens
  source 1..9037: mol_type = genomic DNA
agtcctcccgtcttgcgccgcggccgcgagatccgtgtgtctcccaagatggtggcgctgggctcggggtgactacaggagacgacggggccttttcccttcgccaggacccgacacaccaggcttcgctcgctcgcgcacccctccgccgcgtagccatccgccagcgcgggcgcccgccatccgccgcctacttacgcttcacctctgccgacccggcgcgctcggctgcgggcggcggcgcctccttcggctcctcctcggaatagctcgcggcctgtagcccctggcaggagggcccctcagccccccggtgtggacaggcagcggcggctggcgacgaacgccgggatttcggcggccccggcgctccctttcccggcctcgttttccggataaggaagcgcgggtcccgcatgagccccggcggtggcggcagcgaaagagaacgaggcggtggcgggcggaggcggcgggcgagggcgactacgaccagtgaggcggccgccgcagcccaggcgcgggggcgacgacaggttaaaaatctgtaagagcctgattttagaattcaccagctcctcagaagtttggcgaaatatgagttattaagcctacgctcagatcaaggtagcagctagactggtgtgacaacctgtttttaatcagtgactcaaagctgtgatcaccctgatgtcaccgaatggccacagcttgtaaaagagagttacagtggaggtaaaaggagtggcttgcaggatggagaagctgcaccagtgttattggaagtgagccaccatttgaatttgctagctcatgctgcagtattcagattatgccagcaggtttattttttgttttgcaagccagctctgcctccttacagtatgacatctgatgctggagggtcgcactttcaaaaatgagtcagctggtacatggggttatcatcaatttttagctcttctgtctgggagatacaagtttggaagcaatcttggggtacttacccacaaggctggtggagaccagatcaggagaacctcagtctgacgacattgaagctagccgaatgaagcgagcagctgcaaagcatctaatagaacgctactaccaccagttaactgagggctgtggaaatgaagcctgcacgaatgagttttgtgcttcctgtccaacttttcttcgtatggataataatgcagcagctattaaagccctcgagctttataagattaatgcaaaactctgtgatcctcatccctccaagaaaggagcaagctcagcttaccttgagaactcgaaaggtgcccccaacaactcctgctctgagataaaaatgaacaagaaaggcgctagaattgattttaaagatgtgacttacttaacagaagagaaggtatatgaaattcttgaattatgtagagaaagagaggattattcccctttaatccgtgttattggaagagttttttctagtgctgaggcattggtacagagcttccggaaagttaaacaacacaccaaggaagaactgaaatctcttcaagcaaaagatgaagacaaagatgaagatgaaaaggaaaaagctgcatgttctgctgctgctatggaagaagactcagaagcatcttcctcaaggataggtgatagctcacagggagacaacaatttgcaaaaattaggccctgatgatgtgtctgtggatattgatgccattagaagggtctacaccagattgctctctaatgaaaaaattgaaactgcctttctcaatgcacttgtatatttgtcacctaacgtggaatgtgacttgacgtatcacaatgtatactctcgagatcctaattatctgaatttgttcattatcgtaatggagaatagaaatctccacagtcctgaatatctggaaatggctttgccattattttgcaaagcgatgagcaagctaccccttgcagcccaaggaaaactgatcagactgtggtctaaatacaatgcagaccagattcggagaatgatggagacatttcagcaacttattacttataaagtcataagcaatgaatttaacagtcgaaatctagtgaatgatgatgatgccattgttgctgcttcgaagtgcttgaaaatggtttactatgcaaatgtagtgggaggggaagtggacacaaatcacaatgaagaagatgatgaagagcccatccctgagtccagcgagctgacacttcaggaacttttgggagaagaaagaagaaacaagaaaggtcctcgagtggaccccctggaaactgaacttggtgttaaaaccctggattgtcgaaaaccacttatcccttttgaagagtttattaatgaaccactgaatgaggttctagaaatggataaagattatacttttttcaaagtagaaacagagaacaaattctcttttatgacatgtccctttatattgaatgctgtcacaaagaatttgggattatattatgacaatagaattcgcatgtacagtgaacgaagaatcactgttctctacagcttagttcaaggacagcagttgaatccatatttgagactcaaagttagacgtgaccatatcatagatgatgcacttgtccggctagagatgatcgctatggaaaatcctgcagacttgaagaagcagttgtatgtggaatttgaaggagaacaaggagttgatgagggaggtgtttccaaagaattttttcagctggttgtggaggaaatcttcaatccagatattggtatgttcacatacgatgaatctacaaaattgttttggtttaatccatcttcttttgaaactgagggtcagtttactctgattggcatagtactgggtctggctatttacaataactgtatactggatgtacattttcccatggttgtctacaggaagctaatggggaaaaaaggaacttttcgtgacttgggagactctcacccagttctatatcagagtttaaaagatttattggagtatgaagggaatgtggaagatgacatgatgatcactttccagatatcacagacagatctttttggtaacccaatgatgtatgatctaaaggaaaatggtgataaaattccaattacaaatgaaaacaggaaggaatttgtcaatctttattctgactacattctcaataaatcagtagaaaaacagttcaaggcttttcggagaggttttcatatggtgaccaatgaatctcccttaaagtacttattcagaccagaagaaattgaattgcttatatgtggaagccggaatctagatttccaagcactagaagaaactacagaatatgacggtggctataccagggactctgttctgattagggagttctgggaaatcgttcattcatttacagatgaacagaaaagactcttcttgcagtttacaacgggcacagacagagcacctgtgggaggactaggaaaattaaagatgattatagccaaaaatggcccagacacagaaaggttacctacatctcatacttgctttaatgtgcttttacttccggaatactcaagcaaagaaaaacttaaagagagattgttgaaggccatcacgtatgccaaaggatttggcatgctgtaaaacaaaacaaaacaaaataaaacaaaaaaaaggaaggaaaaaaaaagaaaaaatttaaaaaattttaaaaatataacgagggataaatttttggtggtgatagtgtcccagtacaaaaaggctgtaagatagtcaaccacagtagtcacctatgtctgtgcctcccttctttattggggacatgtgggctggaacagcagatttcagctacatatatgaacaaatcctttattattattataattatttttttgcgtgaaagtgttacatattctttcacttgtatgtacagagaggtttttctgaatatttattttaagggttaaatcacttttgcttgtgtttattactgcttgaggttgagccttttgagtatttaaaaaatatataccaacagaactactctcccaaggaaaatattgccaccatttgtagaccacgtaaccttcaagtatgtgctacttttttgtccctgtatctaactcaaatcaggaactgtattttttttaatgatttgcttttgaaacttgaagtcttgaaaacagtgtgatgcaattactgctgttctagcccccaaagagttttctgtgcaaaatcttgagaatcaatcaataaagaaagatggaaggaagggagaaattggaatgttttaactgcagccctcagaactttagtaacagcacaacaaattaaaaacaaaaacaactcatgccacagtatgtcgtcttcatgtgtcttgcaatgaactgtttcagtagccaatcctctttcttagtatatgaaaggacagggatttttgttcttgttgttctcgttgttgttttaagtttactggggaaagtgcatttggccaaatgaaatggtagtcaagcctattgcaacaaagttaggaagtttgttgtttgtttattataaacaaaaagcatgtgaaagtgcacttaagatagagtttttattaattacttacttattacctagattttaaatagacaatccaaagtctccccttcgtgttgccatcatcttgttgaatcagccattttatcgaggcacgtgatcagtgttgcaacataatgaaaaagatggctactgtgccttgtgttacttaatcatacagtaagctgacctggaaatgaatgaaactattactcctaagaattacattgtatagccccacagattaaatttaattaattaattcaaaacatgttaaacgttactttcatgtactatggaaaagtacaagtaggtttacattactgatttccagaagtaagtagtttcccctttcctagtcttctgtgtatgtgatgttgttaatttcttttattgcattataaaataaaaggattatgtatttttaactaaggtgagacattgatatatccttttgctacaagctatagctaatgtgctgagcttgtgccttggtgattgattgattgattgactgattgttttaactgattactgtagatcaacctgatgatttgtttgtttgaaattggcaggaaaaatgcagctttcaaatcattggggggagaaaaaggatgtctttcaggattattttaattaatttttttcataattgagacagaactgtttgttatgtaccataatgctaaataaaactgtggcacttttcaccataatttaatttagtggaaaaagaagacaatgctttccatattgtgataaggtaacatggggtttttctgggccagcctttagaacactgttagggtacatacgctaccttgatgaaagggaccttcgtgcaactgtagtcatcttaaaggcttctcatccactgtgcttcttaatgtgtaattaaagtgaggagaaattaaatactctgagggcgttttatataataaattcgtgaagaaatgtgtgctcttcagttctcaagttttattattatggtatttattaaagttctacaattgtaataacgtatccatatgacaagttttaaagtggtaattgaaataggttatcagatatagagttgttcacatcaagtagacttttaacagagtcagaatgaacctacccttaaaattttagagaaaaaaaatcgtcggttgcacagaatagctgctctagcttgcttaattatgccgggcatgttgtcactcctcttacttttgctgccttttcattactatttaatggaatgtccctgaacaataaggaagagcaaaacatagacattttgactacagtggatacttcctctaccccaaatgttatgttataaaagtactttttttgcccaggtactctattatatattttggttttctttgaattagacctcaatctccaggaagctctggagggaaaaaaaggaaccataaactaaagtaactggttttccaaataaatgtaaacttttttaaccttttattattatagaacatttcaaacatacataaaacatgaaaacagcctgcagccaaacttttctggaccttggcagctccagcaaatgagctggtcatcctaaccctggtttcctgagacaactacttttggggatgcttgcttgtatagggagatgatagatagatagatacatatcaaaaagaaacttgaaaaaggcttcgaacagaacttgccgatgttactcatccctcctcggtacagacattctgttagaacagatggttgtaatggggcagcatcactccctattcccattaaaaacatgaccattctgagatttcaggccccttcgaggaatttttctcaagaattccatacaaactgtcagaggaagaaatgtcgtcccaagactagtccctgtgtagtcttgatccctttacctgcttactgtaattttttttctctgactttccgccagtgtctaagggccatctgtacccctcccacccttccatgagccactgtataatccaaaaacacaccttccatttgctccctcacttgtctccttttacctcaacagtgttagtgtgtaaagaattgcctggggagggtagagggttttacaagtacagagtcccaagtcttttctcccctccccgttagtgggttggcatttattaataggcactgcaagattttgatgcaggtgtggggtagatatcactgtgaaaggctactaatgcatggtagtttcaccgaaagtacagtcttcaaggatccttataatctcctcattgccaaaatcagtaacatctataaccttgacaacaccctagcttgggctgttgcttctctggctacttgtttttccatcccagtttacccagattttagatggatactcctccaattctgcttaaagtccttacctgttcttgcccagttccctctagtcaacctcagtcactcccaaagattcttccccaatcccatatcttttgctcagacctctgtctctgggatttctttgttacctcatagtcagtagtcctaaaaacaaaattcttcatcttgcatctctatcgaccgaccattctttgtttctttttaagaaatgtaaccttcaccccaatcatcaaaatctctcattcctcaattgtcacaggttgtcacttctttccccctaaacctctcccatcattccttccttctttatactgcccttacaggtcctgatcctctgactcacccggacattcttagcagctgcctaatttcactccctgactctcatctccctcttccaatccttttcattgtgctagaacactatcttgctaattttaatatcctctgcattcagtgcctccacagattgccccctcactgacctttccaatttggccttgtgttacacactttcctcgctgcattcctacccagcatcttcacttgtcatatttctcaaatactcttcatgaccagatatttaaagtacctcatccatgaagacttcatcaacccccaaagtgcctccaatgcttccgtggtagcacagcataatggggtacatttcttagttgaacagtgaggagtcactgggattcttacagagtgtcttagggtctcctcttgatactctttccacatttcagttaaggaattttcttacatctttttttcttctaataacctttgcctggagtgtaagtaaattcatgatagagactgtcatttttaaaaaaaaaaacaaaccattttgcctttcacatgttattacctccatctttctgttatcttgtcagtgttgccacctaaatgattgaaaatgaccgagcatgcagtagaatgtagtgaagtttcctatttcatccattttttgcataagtgcattggtatctgtatatccatctgcccaagcaccagttgttgaaaagactattatttccccatgaatggtcctggtacccttgtcaaagaacagttgaccataaatataagactttctggattctcagtcttactccattgccctatatgtctgtcgttataccagcaccgcactgtcttgatggctgtagcttggtagtaagtttagatttgggatgtgcaagtcctccattttttttttttttttccccaaaatcattttgtctgttttgggtcccttgcattgcatatgaatttttatatgatcattgtgtcaattcctgcaaaacagctgggatcttgatagggatttagttgaattggtagataaatttgagaaataactgctattttaatggtgttaggttttctgttccatgactgtgggatgtctttgcatttgcttaggtctttatttcagtgatgttttagagatttcagtgtgcaagtcttgacgtctttaatttttttctaagtattttactgatgccactttaattatatgattattttctaatttttatttttgtattcatcactggtgttagaaataaaattaatttttgtatattgattttgtatattgtagcttttctaaaattctttttttgtcacttagtattttttgcatatgagatcatgcatctgtgaacagaaatacttttacttcttcctttccagtctagattcctattatttcattttcttgccttagtgtgctggctagcacctccagtacaatattggatagaagtgacaagagcagacatctttttcttgttcctgattttaaggggaaagcattcagtctttcaccattgagtatgatgttagctagctgtgggtttgcttcaagttgaggaaattcttttattaaacctagtttactgagtgttttttaatcaaaaaaaaaaaaaggaggggctgtgggttttgttaaatgcttcttctgtatcaagattttcatgttgttttgtcctttattaatatgttgtattaatggacttttgtatattgaattaactttgcattcctgggataatctcagttgtccatgctacataaaccttgttctatgctgctgga

SEQ ID NO: 99 - DNA, 8874 bp, Homo sapiens
  source 1..8874: mol_type = genomic DNA
agtcctcccgtcttgcgccgcggccgcgagatccgtgtgtctcccaagatggtggcgctgggctcggggtgactacaggagacgacggggccttttcccttcgccaggacccgacacaccaggcttcgctcgctcgcgcacccctccgccgcgtagccatccgccagcgcgggcgcccgccatccgccgcctacttacgcttcacctctgccgacccggcgcgctcggctgcgggcggcggcgcctccttcggctcctcctcggaatagctcgcggcctgtagcccctggcaggagggcccctcagccccccggtgtggacaggcagcggcggctggcgacgaacgccgggatttcggcggccccggcgctccctttcccggcctcgttttccggataaggaagcgcgggtcccgcatgagccccggcggtggcggcagcgaaagagaacgaggcggtggcgggcggaggcggcgggcgagggcgactacgaccagtgaggcggccgccgcagcccaggcgcgggggcgacgacaggttaaaaatctgtaagagcctgattttagaattcaccagctcctcagaagtttggcgaaatatgagttattaagcctacgctcagatcaaggtagcagctagactggtgtgacaacctgtttttaatcagtgactcaaagctgtgatcaccctgatgtcaccgaatggccacagcttgtaaaagtatgacatctgatgctggagggtcgcactttcaaaaatgagtcagctggtacatggggttatcatcaatttttagctcttctgtctgggagatacaagtttggaagcaatcttggggtacttacccacaaggctggtggagaccagatcaggagaacctcagtctgacgacattgaagctagccgaatgaagcgagcagctgcaaagcatctaatagaacgctactaccaccagttaactgagggctgtggaaatgaagcctgcacgaatgagttttgtgcttcctgtccaacttttcttcgtatggataataatgcagcagctattaaagccctcgagctttataagattaatgcaaaactctgtgatcctcatccctccaagaaaggagcaagctcagcttaccttgagaactcgaaaggtgcccccaacaactcctgctctgagataaaaatgaacaagaaaggcgctagaattgattttaaagatgtgacttacttaacagaagagaaggtatatgaaattcttgaattatgtagagaaagagaggattattcccctttaatccgtgttattggaagagttttttctagtgctgaggcattggtacagagcttccggaaagttaaacaacacaccaaggaagaactgaaatctcttcaagcaaaagatgaagacaaagatgaagatgaaaaggaaaaagctgcatgttctgctgctgctatggaagaagactcagaagcatcttcctcaaggataggtgatagctcacagggagacaacaatttgcaaaaattaggccctgatgatgtgtctgtggatattgatgccattagaagggtctacaccagattgctctctaatgaaaaaattgaaactgcctttctcaatgcacttgtatatttgtcacctaacgtggaatgtgacttgacgtatcacaatgtatactctcgagatcctaattatctgaatttgttcattatcgtaatggagaatagaaatctccacagtcctgaatatctggaaatggctttgccattattttgcaaagcgatgagcaagctaccccttgcagcccaaggaaaactgatcagactgtggtctaaatacaatgcagaccagattcggagaatgatggagacatttcagcaacttattacttataaagtcataagcaatgaatttaacagtcgaaatctagtgaatgatgatgatgccattgttgctgcttcgaagtgcttgaaaatggtttactatgcaaatgtagtgggaggggaagtggacacaaatcacaatgaagaagatgatgaagagcccatccctgagtccagcgagctgacacttcaggaacttttgggagaagaaagaagaaacaagaaaggtcctcgagtggaccccctggaaactgaacttggtgttaaaaccctggattgtcgaaaaccacttatcccttttgaagagtttattaatgaaccactgaatgaggttctagaaatggataaagattatacttttttcaaagtagaaacagagaacaaattctcttttatgacatgtccctttatattgaatgctgtcacaaagaatttgggattatattatgacaatagaattcgcatgtacagtgaacgaagaatcactgttctctacagcttagttcaaggacagcagttgaatccatatttgagactcaaagttagacgtgaccatatcatagatgatgcacttgtccggctagagatgatcgctatggaaaatcctgcagacttgaagaagcagttgtatgtggaatttgaaggagaacaaggagttgatgagggaggtgtttccaaagaattttttcagctggttgtggaggaaatcttcaatccagatattggtatgttcacatacgatgaatctacaaaattgttttggtttaatccatcttcttttgaaactgagggtcagtttactctgattggcatagtactgggtctggctatttacaataactgtatactggatgtacattttcccatggttgtctacaggaagctaatggggaaaaaaggaacttttcgtgacttgggagactctcacccagttctatatcagagtttaaaagatttattggagtatgaagggaatgtggaagatgacatgatgatcactttccagatatcacagacagatctttttggtaacccaatgatgtatgatctaaaggaaaatggtgataaaattccaattacaaatgaaaacaggaaggaatttgtcaatctttattctgactacattctcaataaatcagtagaaaaacagttcaaggcttttcggagaggttttcatatggtgaccaatgaatctcccttaaagtacttattcagaccagaagaaattgaattgcttatatgtggaagccggaatctagatttccaagcactagaagaaactacagaatatgacggtggctataccagggactctgttctgattagggagttctgggaaatcgttcattcatttacagatgaacagaaaagactcttcttgcagtttacaacgggcacagacagagcacctgtgggaggactaggaaaattaaagatgattatagccaaaaatggcccagacacagaaaggttacctacatctcatacttgctttaatgtgcttttacttccggaatactcaagcaaagaaaaacttaaagagagattgttgaaggccatcacgtatgccaaaggatttggcatgctgtaaaacaaaacaaaacaaaataaaacaaaaaaaaggaaggaaaaaaaaagaaaaaatttaaaaaattttaaaaatataacgagggataaatttttggtggtgatagtgtcccagtacaaaaaggctgtaagatagtcaaccacagtagtcacctatgtctgtgcctcccttctttattggggacatgtgggctggaacagcagatttcagctacatatatgaacaaatcctttattattattataattatttttttgcgtgaaagtgttacatattctttcacttgtatgtacagagaggtttttctgaatatttattttaagggttaaatcacttttgcttgtgtttattactgcttgaggttgagccttttgagtatttaaaaaatatataccaacagaactactctcccaaggaaaatattgccaccatttgtagaccacgtaaccttcaagtatgtgctacttttttgtccctgtatctaactcaaatcaggaactgtattttttttaatgatttgcttttgaaacttgaagtcttgaaaacagtgtgatgcaattactgctgttctagcccccaaagagttttctgtgcaaaatcttgagaatcaatcaataaagaaagatggaaggaagggagaaattggaatgttttaactgcagccctcagaactttagtaacagcacaacaaattaaaaacaaaaacaactcatgccacagtatgtcgtcttcatgtgtcttgcaatgaactgtttcagtagccaatcctctttcttagtatatgaaaggacagggatttttgttcttgttgttctcgttgttgttttaagtttactggggaaagtgcatttggccaaatgaaatggtagtcaagcctattgcaacaaagttaggaagtttgttgtttgtttattataaacaaaaagcatgtgaaagtgcacttaagatagagtttttattaattacttacttattacctagattttaaatagacaatccaaagtctccccttcgtgttgccatcatcttgttgaatcagccattttatcgaggcacgtgatcagtgttgcaacataatgaaaaagatggctactgtgccttgtgttacttaatcatacagtaagctgacctggaaatgaatgaaactattactcctaagaattacattgtatagccccacagattaaatttaattaattaattcaaaacatgttaaacgttactttcatgtactatggaaaagtacaagtaggtttacattactgatttccagaagtaagtagtttcccctttcctagtcttctgtgtatgtgatgttgttaatttcttttattgcattataaaataaaaggattatgtatttttaactaaggtgagacattgatatatccttttgctacaagctatagctaatgtgctgagcttgtgccttggtgattgattgattgattgactgattgttttaactgattactgtagatcaacctgatgatttgtttgtttgaaattggcaggaaaaatgcagctttcaaatcattggggggagaaaaaggatgtctttcaggattattttaattaatttttttcataattgagacagaactgtttgttatgtaccataatgctaaataaaactgtggcacttttcaccataatttaatttagtggaaaaagaagacaatgctttccatattgtgataaggtaacatggggtttttctgggccagcctttagaacactgttagggtacatacgctaccttgatgaaagggaccttcgtgcaactgtagtcatcttaaaggcttctcatccactgtgcttcttaatgtgtaattaaagtgaggagaaattaaatactctgagggcgttttatataataaattcgtgaagaaatgtgtgctcttcagttctcaagttttattattatggtatttattaaagttctacaattgtaataacgtatccatatgacaagttttaaagtggtaattgaaataggttatcagatatagagttgttcacatcaagtagacttttaacagagtcagaatgaacctacccttaaaattttagagaaaaaaaatcgtcggttgcacagaatagctgctctagcttgcttaattatgccgggcatgttgtcactcctcttacttttgctgccttttcattactatttaatggaatgtccctgaacaataaggaagagcaaaacatagacattttgactacagtggatacttcctctaccccaaatgttatgttataaaagtactttttttgcccaggtactctattatatattttggttttctttgaattagacctcaatctccaggaagctctggagggaaaaaaaggaaccataaactaaagtaactggttttccaaataaatgtaaacttttttaaccttttattattatagaacatttcaaacatacataaaacatgaaaacagcctgcagccaaacttttctggaccttggcagctccagcaaatgagctggtcatcctaaccctggtttcctgagacaactacttttggggatgcttgcttgtatagggagatgatagatagatagatacatatcaaaaagaaacttgaaaaaggcttcgaacagaacttgccgatgttactcatccctcctcggtacagacattctgttagaacagatggttgtaatggggcagcatcactccctattcccattaaaaacatgaccattctgagatttcaggccccttcgaggaatttttctcaagaattccatacaaactgtcagaggaagaaatgtcgtcccaagactagtccctgtgtagtcttgatccctttacctgcttactgtaattttttttctctgactttccgccagtgtctaagggccatctgtacccctcccacccttccatgagccactgtataatccaaaaacacaccttccatttgctccctcacttgtctccttttacctcaacagtgttagtgtgtaaagaattgcctggggagggtagagggttttacaagtacagagtcccaagtcttttctcccctccccgttagtgggttggcatttattaataggcactgcaagattttgatgcaggtgtggggtagatatcactgtgaaaggctactaatgcatggtagtttcaccgaaagtacagtcttcaaggatccttataatctcctcattgccaaaatcagtaacatctataaccttgacaacaccctagcttgggctgttgcttctctggctacttgtttttccatcccagtttacccagattttagatggatactcctccaattctgcttaaagtccttacctgttcttgcccagttccctctagtcaacctcagtcactcccaaagattcttccccaatcccatatcttttgctcagacctctgtctctgggatttctttgttacctcatagtcagtagtcctaaaaacaaaattcttcatcttgcatctctatcgaccgaccattctttgtttctttttaagaaatgtaaccttcaccccaatcatcaaaatctctcattcctcaattgtcacaggttgtcacttctttccccctaaacctctcccatcattccttccttctttatactgcccttacaggtcctgatcctctgactcacccggacattcttagcagctgcctaatttcactccctgactctcatctccctcttccaatccttttcattgtgctagaacactatcttgctaattttaatatcctctgcattcagtgcctccacagattgccccctcactgacctttccaatttggccttgtgttacacactttcctcgctgcattcctacccagcatcttcacttgtcatatttctcaaatactcttcatgaccagatatttaaagtacctcatccatgaagacttcatcaacccccaaagtgcctccaatgcttccgtggtagcacagcataatggggtacatttcttagttgaacagtgaggagtcactgggattcttacagagtgtcttagggtctcctcttgatactctttccacatttcagttaaggaattttcttacatctttttttcttctaataacctttgcctggagtgtaagtaaattcatgatagagactgtcatttttaaaaaaaaaaacaaaccattttgcctttcacatgttattacctccatctttctgttatcttgtcagtgttgccacctaaatgattgaaaatgaccgagcatgcagtagaatgtagtgaagtttcctatttcatccattttttgcataagtgcattggtatctgtatatccatctgcccaagcaccagttgttgaaaagactattatttccccatgaatggtcctggtacccttgtcaaagaacagttgaccataaatataagactttctggattctcagtcttactccattgccctatatgtctgtcgttataccagcaccgcactgtcttgatggctgtagcttggtagtaagtttagatttgggatgtgcaagtcctccattttttttttttttttccccaaaatcattttgtctgttttgggtcccttgcattgcatatgaatttttatatgatcattgtgtcaattcctgcaaaacagctgggatcttgatagggatttagttgaattggtagataaatttgagaaataactgctattttaatggtgttaggttttctgttccatgactgtgggatgtctttgcatttgcttaggtctttatttcagtgatgttttagagatttcagtgtgcaagtcttgacgtctttaatttttttctaagtattttactgatgccactttaattatatgattattttctaatttttatttttgtattcatcactggtgttagaaataaaattaatttttgtatattgattttgtatattgtagcttttctaaaattctttttttgtcacttagtattttttgcatatgagatcatgcatctgtgaacagaaatacttttacttcttcctttccagtctagattcctattatttcattttcttgccttagtgtgctggctagcacctccagtacaatattggatagaagtgacaagagcagacatctttttcttgttcctgattttaaggggaaagcattcagtctttcaccattgagtatgatgttagctagctgtgggtttgcttcaagttgaggaaattcttttattaaacctagtttactgagtgttttttaatcaaaaaaaaaaaaaggaggggctgtgggttttgttaaatgcttcttctgtatcaagattttcatgttgttttgtcctttattaatatgttgtattaatggacttttgtatattgaattaactttgcattcctgggataatctcagttgtccatgctacataaaccttgttctatgctgctgga

SEQ ID NO: 100 - DNA, 8890 bp, Homo sapiens
  source 1..8890: mol_type = genomic DNA
agtcctcccgtcttgcgccgcggccgcgagatccgtgtgtctcccaagatggtggcgctgggctcggggtgactacaggagacgacggggccttttcccttcgccaggacccgacacaccaggcttcgctcgctcgcgcacccctccgccgcgtagccatccgccagcgcgggcgcccgccatccgccgcctacttacgcttcacctctgccgacccggcgcgctcggctgcgggcggcggcgcctccttcggctcctcctcggaatagctcgcggcctgtagcccctggcaggagggcccctcagccccccggtgtggacaggcagcggcggctggcgacgaacgccgggatttcggcggccccggcgctccctttcccggcctcgttttccggataaggaagcgcgggtcccgcatgagccccggcggtggcggcagcgaaagagaacgaggcggtggcgggcggaggcggcgggcgagggcgactacgaccagtgaggcggccgccgcagcccaggcgcgggggcgacgacaggttaaaaatctgtaagagcctgattttagaattcaccagctcctcagaagtttggcgaaatatgagttattaagcctacgctcagatcaaggtagcagctagactggtgtgacaacctgtttttaatcagtgactcaaagctgtgatcaccctgatgtcaccgaatggccacagcttgtaaaagctctgcctccttacagtatgacatctgatgctggagggtcgcactttcaaaaatgagtcagctggtacatggggttatcatcaatttttagctcttctgtctgggagatacaagtttggaagcaatcttggggtacttacccacaaggctggtggagaccagatcaggagaacctcagtctgacgacattgaagctagccgaatgaagcgagcagctgcaaagcatctaatagaacgctactaccaccagttaactgagggctgtggaaatgaagcctgcacgaatgagttttgtgcttcctgtccaacttttcttcgtatggataataatgcagcagctattaaagccctcgagctttataagattaatgcaaaactctgtgatcctcatccctccaagaaaggagcaagctcagcttaccttgagaactcgaaaggtgcccccaacaactcctgctctgagataaaaatgaacaagaaaggcgctagaattgattttaaagatgtgacttacttaacagaagagaaggtatatgaaattcttgaattatgtagagaaagagaggattattcccctttaatccgtgttattggaagagttttttctagtgctgaggcattggtacagagcttccggaaagttaaacaacacaccaaggaagaactgaaatctcttcaagcaaaagatgaagacaaagatgaagatgaaaaggaaaaagctgcatgttctgctgctgctatggaagaagactcagaagcatcttcctcaaggataggtgatagctcacagggagacaacaatttgcaaaaattaggccctgatgatgtgtctgtggatattgatgccattagaagggtctacaccagattgctctctaatgaaaaaattgaaactgcctttctcaatgcacttgtatatttgtcacctaacgtggaatgtgacttgacgtatcacaatgtatactctcgagatcctaattatctgaatttgttcattatcgtaatggagaatagaaatctccacagtcctgaatatctggaaatggctttgccattattttgcaaagcgatgagcaagctaccccttgcagcccaaggaaaactgatcagactgtggtctaaatacaatgcagaccagattcggagaatgatggagacatttcagcaacttattacttataaagtcataagcaatgaatttaacagtcgaaatctagtgaatgatgatgatgccattgttgctgcttcgaagtgcttgaaaatggtttactatgcaaatgtagtgggaggggaagtggacacaaatcacaatgaagaagatgatgaagagcccatccctgagtccagcgagctgacacttcaggaacttttgggagaagaaagaagaaacaagaaaggtcctcgagtggaccccctggaaactgaacttggtgttaaaaccctggattgtcgaaaaccacttatcccttttgaagagtttattaatgaaccactgaatgaggttctagaaatggataaagattatacttttttcaaagtagaaacagagaacaaattctcttttatgacatgtccctttatattgaatgctgtcacaaagaatttgggattatattatgacaatagaattcgcatgtacagtgaacgaagaatcactgttctctacagcttagttcaaggacagcagttgaatccatatttgagactcaaagttagacgtgaccatatcatagatgatgcacttgtccggctagagatgatcgctatggaaaatcctgcagacttgaagaagcagttgtatgtggaatttgaaggagaacaaggagttgatgagggaggtgtttccaaagaattttttcagctggttgtggaggaaatcttcaatccagatattggtatgttcacatacgatgaatctacaaaattgttttggtttaatccatcttcttttgaaactgagggtcagtttactctgattggcatagtactgggtctggctatttacaataactgtatactggatgtacattttcccatggttgtctacaggaagctaatggggaaaaaaggaacttttcgtgacttgggagactctcacccagttctatatcagagtttaaaagatttattggagtatgaagggaatgtggaagatgacatgatgatcactttccagatatcacagacagatctttttggtaacccaatgatgtatgatctaaaggaaaatggtgataaaattccaattacaaatgaaaacaggaaggaatttgtcaatctttattctgactacattctcaataaatcagtagaaaaacagttcaaggcttttcggagaggttttcatatggtgaccaatgaatctcccttaaagtacttattcagaccagaagaaattgaattgcttatatgtggaagccggaatctagatttccaagcactagaagaaactacagaatatgacggtggctataccagggactctgttctgattagggagttctgggaaatcgttcattcatttacagatgaacagaaaagactcttcttgcagtttacaacgggcacagacagagcacctgtgggaggactaggaaaattaaagatgattatagccaaaaatggcccagacacagaaaggttacctacatctcatacttgctttaatgtgcttttacttccggaatactcaagcaaagaaaaacttaaagagagattgttgaaggccatcacgtatgccaaaggatttggcatgctgtaaaacaaaacaaaacaaaataaaacaaaaaaaaggaaggaaaaaaaaagaaaaaatttaaaaaattttaaaaatataacgagggataaatttttggtggtgatagtgtcccagtacaaaaaggctgtaagatagtcaaccacagtagtcacctatgtctgtgcctcccttctttattggggacatgtgggctggaacagcagatttcagctacatatatgaacaaatcctttattattattataattatttttttgcgtgaaagtgttacatattctttcacttgtatgtacagagaggtttttctgaatatttattttaagggttaaatcacttttgcttgtgtttattactgcttgaggttgagccttttgagtatttaaaaaatatataccaacagaactactctcccaaggaaaatattgccaccatttgtagaccacgtaaccttcaagtatgtgctacttttttgtccctgtatctaactcaaatcaggaactgtattttttttaatgatttgcttttgaaacttgaagtcttgaaaacagtgtgatgcaattactgctgttctagcccccaaagagttttctgtgcaaaatcttgagaatcaatcaataaagaaagatggaaggaagggagaaattggaatgttttaactgcagccctcagaactttagtaacagcacaacaaattaaaaacaaaaacaactcatgccacagtatgtcgtcttcatgtgtcttgcaatgaactgtttcagtagccaatcctctttcttagtatatgaaaggacagggatttttgttcttgttgttctcgttgttgttttaagtttactggggaaagtgcatttggccaaatgaaatggtagtcaagcctattgcaacaaagttaggaagtttgttgtttgtttattataaacaaaaagcatgtgaaagtgcacttaagatagagtttttattaattacttacttattacctagattttaaatagacaatccaaagtctccccttcgtgttgccatcatcttgttgaatcagccattttatcgaggcacgtgatcagtgttgcaacataatgaaaaagatggctactgtgccttgtgttacttaatcatacagtaagctgacctggaaatgaatgaaactattactcctaagaattacattgtatagccccacagattaaatttaattaattaattcaaaacatgttaaacgttactttcatgtactatggaaaagtacaagtaggtttacattactgatttccagaagtaagtagtttcccctttcctagtcttctgtgtatgtgatgttgttaatttcttttattgcattataaaataaaaggattatgtatttttaactaaggtgagacattgatatatccttttgctacaagctatagctaatgtgctgagcttgtgccttggtgattgattgattgattgactgattgttttaactgattactgtagatcaacctgatgatttgtttgtttgaaattggcaggaaaaatgcagctttcaaatcattggggggagaaaaaggatgtctttcaggattattttaattaatttttttcataattgagacagaactgtttgttatgtaccataatgctaaataaaactgtggcacttttcaccataatttaatttagtggaaaaagaagacaatgctttccatattgtgataaggtaacatggggtttttctgggccagcctttagaacactgttagggtacatacgctaccttgatgaaagggaccttcgtgcaactgtagtcatcttaaaggcttctcatccactgtgcttcttaatgtgtaattaaagtgaggagaaattaaatactctgagggcgttttatataataaattcgtgaagaaatgtgtgctcttcagttctcaagttttattattatggtatttattaaagttctacaattgtaataacgtatccatatgacaagttttaaagtggtaattgaaataggttatcagatatagagttgttcacatcaagtagacttttaacagagtcagaatgaacctacccttaaaattttagagaaaaaaaatcgtcggttgcacagaatagctgctctagcttgcttaattatgccgggcatgttgtcactcctcttacttttgctgccttttcattactatttaatggaatgtccctgaacaataaggaagagcaaaacatagacattttgactacagtggatacttcctctaccccaaatgttatgttataaaagtactttttttgcccaggtactctattatatattttggttttctttgaattagacctcaatctccaggaagctctggagggaaaaaaaggaaccataaactaaagtaactggttttccaaataaatgtaaacttttttaaccttttattattatagaacatttcaaacatacataaaacatgaaaacagcctgcagccaaacttttctggaccttggcagctccagcaaatgagctggtcatcctaaccctggtttcctgagacaactacttttggggatgcttgcttgtatagggagatgatagatagatagatacatatcaaaaagaaacttgaaaaaggcttcgaacagaacttgccgatgttactcatccctcctcggtacagacattctgttagaacagatggttgtaatggggcagcatcactccctattcccattaaaaacatgaccattctgagatttcaggccccttcgaggaatttttctcaagaattccatacaaactgtcagaggaagaaatgtcgtcccaagactagtccctgtgtagtcttgatccctttacctgcttactgtaattttttttctctgactttccgccagtgtctaagggccatctgtacccctcccacccttccatgagccactgtataatccaaaaacacaccttccatttgctccctcacttgtctccttttacctcaacagtgttagtgtgtaaagaattgcctggggagggtagagggttttacaagtacagagtcccaagtcttttctcccctccccgttagtgggttggcatttattaataggcactgcaagattttgatgcaggtgtggggtagatatcactgtgaaaggctactaatgcatggtagtttcaccgaaagtacagtcttcaaggatccttataatctcctcattgccaaaatcagtaacatctataaccttgacaacaccctagcttgggctgttgcttctctggctacttgtttttccatcccagtttacccagattttagatggatactcctccaattctgcttaaagtccttacctgttcttgcccagttccctctagtcaacctcagtcactcccaaagattcttccccaatcccatatcttttgctcagacctctgtctctgggatttctttgttacctcatagtcagtagtcctaaaaacaaaattcttcatcttgcatctctatcgaccgaccattctttgtttctttttaagaaatgtaaccttcaccccaatcatcaaaatctctcattcctcaattgtcacaggttgtcacttctttccccctaaacctctcccatcattccttccttctttatactgcccttacaggtcctgatcctctgactcacccggacattcttagcagctgcctaatttcactccctgactctcatctccctcttccaatccttttcattgtgctagaacactatcttgctaattttaatatcctctgcattcagtgcctccacagattgccccctcactgacctttccaatttggccttgtgttacacactttcctcgctgcattcctacccagcatcttcacttgtcatatttctcaaatactcttcatgaccagatatttaaagtacctcatccatgaagacttcatcaacccccaaagtgcctccaatgcttccgtggtagcacagcataatggggtacatttcttagttgaacagtgaggagtcactgggattcttacagagtgtcttagggtctcctcttgatactctttccacatttcagttaaggaattttcttacatctttttttcttctaataacctttgcctggagtgtaagtaaattcatgatagagactgtcatttttaaaaaaaaaaacaaaccattttgcctttcacatgttattacctccatctttctgttatcttgtcagtgttgccacctaaatgattgaaaatgaccgagcatgcagtagaatgtagtgaagtttcctatttcatccattttttgcataagtgcattggtatctgtatatccatctgcccaagcaccagttgttgaaaagactattatttccccatgaatggtcctggtacccttgtcaaagaacagttgaccataaatataagactttctggattctcagtcttactccattgccctatatgtctgtcgttataccagcaccgcactgtcttgatggctgtagcttggtagtaagtttagatttgggatgtgcaagtcctccattttttttttttttttccccaaaatcattttgtctgttttgggtcccttgcattgcatatgaatttttatatgatcattgtgtcaattcctgcaaaacagctgggatcttgatagggatttagttgaattggtagataaatttgagaaataactgctattttaatggtgttaggttttctgttccatgactgtgggatgtctttgcatttgcttaggtctttatttcagtgatgttttagagatttcagtgtgcaagtcttgacgtctttaatttttttctaagtattttactgatgccactttaattatatgattattttctaatttttatttttgtattcatcactggtgttagaaataaaattaatttttgtatattgattttgtatattgtagcttttctaaaattctttttttgtcacttagtattttttgcatatgagatcatgcatctgtgaacagaaatacttttacttcttcctttccagtctagattcctattatttcattttcttgccttagtgtgctggctagcacctccagtacaatattggatagaagtgacaagagcagacatctttttcttgttcctgattttaaggggaaagcattcagtctttcaccattgagtatgatgttagctagctgtgggtttgcttcaagttgaggaaattcttttattaaacctagtttactgagtgttttttaatcaaaaaaaaaaaaaggaggggctgtgggttttgttaaatgcttcttctgtatcaagattttcatgttgttttgtcctttattaatatgttgtattaatggacttttgtatattgaattaactttgcattcctgggataatctcagttgtccatgctacataaaccttgttctatgctgctgga

SEQ ID NO: 101 - DNA, 8894 bp, Homo sapiens
  source 1..8894: mol_type = genomic DNA
agtcctcccgtcttgcgccgcggccgcgagatccgtgtgtctcccaagatggtggcgctgggctcggggtgactacaggagacgacggggccttttcccttcgccaggacccgacacaccaggcttcgctcgctcgcgcacccctccgccgcgtagccatccgccagcgcgggcgcccgccatccgccgcctacttacgcttcacctctgccgacccggcgcgctcggctgcgggcggcggcgcctccttcggctcctcctcggaatagctcgcggcctgtagcccctggcaggagggcccctcagccccccggtgtggacaggcagcggcggctggcgacgaacgccgggatttcggcggccccggcgctccctttcccggcctcgttttccggataaggaagcgcgggtcccgcatgagccccggcggtggcggcagcgaaagagaacgaggcggtggcgggcggaggcggcgggcgagggcgactacgaccagtgaggcggccgccgcagcccaggcgcgggggcgacgacaggttaaaaatctgtaagagcctgattttagaattcaccagctcctcagaagtttggcgaaatatgagttattaagcctacgctcagatcaaggtagcagctagactggtgtgacaacctgtttttaatcagtgactcaaagctgtgatcaccctgatgtcaccgaatggccacagcttgtaaaagccagctctgcctccttacagtatgacatctgatgctggagggtcgcactttcaaaaatgagtcagctggtacatggggttatcatcaatttttagctcttctgtctgggagatacaagtttggaagcaatcttggggtacttacccacaaggctggtggagaccagatcaggagaacctcagtctgacgacattgaagctagccgaatgaagcgagcagctgcaaagcatctaatagaacgctactaccaccagttaactgagggctgtggaaatgaagcctgcacgaatgagttttgtgcttcctgtccaacttttcttcgtatggataataatgcagcagctattaaagccctcgagctttataagattaatgcaaaactctgtgatcctcatccctccaagaaaggagcaagctcagcttaccttgagaactcgaaaggtgcccccaacaactcctgctctgagataaaaatgaacaagaaaggcgctagaattgattttaaagatgtgacttacttaacagaagagaaggtatatgaaattcttgaattatgtagagaaagagaggattattcccctttaatccgtgttattggaagagttttttctagtgctgaggcattggtacagagcttccggaaagttaaacaacacaccaaggaagaactgaaatctcttcaagcaaaagatgaagacaaagatgaagatgaaaaggaaaaagctgcatgttctgctgctgctatggaagaagactcagaagcatcttcctcaaggataggtgatagctcacagggagacaacaatttgcaaaaattaggccctgatgatgtgtctgtggatattgatgccattagaagggtctacaccagattgctctctaatgaaaaaattgaaactgcctttctcaatgcacttgtatatttgtcacctaacgtggaatgtgacttgacgtatcacaatgtatactctcgagatcctaattatctgaatttgttcattatcgtaatggagaatagaaatctccacagtcctgaatatctggaaatggctttgccattattttgcaaagcgatgagcaagctaccccttgcagcccaaggaaaactgatcagactgtggtctaaatacaatgcagaccagattcggagaatgatggagacatttcagcaacttattacttataaagtcataagcaatgaatttaacagtcgaaatctagtgaatgatgatgatgccattgttgctgcttcgaagtgcttgaaaatggtttactatgcaaatgtagtgggaggggaagtggacacaaatcacaatgaagaagatgatgaagagcccatccctgagtccagcgagctgacacttcaggaacttttgggagaagaaagaagaaacaagaaaggtcctcgagtggaccccctggaaactgaacttggtgttaaaaccctggattgtcgaaaaccacttatcccttttgaagagtttattaatgaaccactgaatgaggttctagaaatggataaagattatacttttttcaaagtagaaacagagaacaaattctcttttatgacatgtccctttatattgaatgctgtcacaaagaatttgggattatattatgacaatagaattcgcatgtacagtgaacgaagaatcactgttctctacagcttagttcaaggacagcagttgaatccatatttgagactcaaagttagacgtgaccatatcatagatgatgcacttgtccggctagagatgatcgctatggaaaatcctgcagacttgaagaagcagttgtatgtggaatttgaaggagaacaaggagttgatgagggaggtgtttccaaagaattttttcagctggttgtggaggaaatcttcaatccagatattggtatgttcacatacgatgaatctacaaaattgttttggtttaatccatcttcttttgaaactgagggtcagtttactctgattggcatagtactgggtctggctatttacaataactgtatactggatgtacattttcccatggttgtctacaggaagctaatggggaaaaaaggaacttttcgtgacttgggagactctcacccagttctatatcagagtttaaaagatttattggagtatgaagggaatgtggaagatgacatgatgatcactttccagatatcacagacagatctttttggtaacccaatgatgtatgatctaaaggaaaatggtgataaaattccaattacaaatgaaaacaggaaggaatttgtcaatctttattctgactacattctcaataaatcagtagaaaaacagttcaaggcttttcggagaggttttcatatggtgaccaatgaatctcccttaaagtacttattcagaccagaagaaattgaattgcttatatgtggaagccggaatctagatttccaagcactagaagaaactacagaatatgacggtggctataccagggactctgttctgattagggagttctgggaaatcgttcattcatttacagatgaacagaaaagactcttcttgcagtttacaacgggcacagacagagcacctgtgggaggactaggaaaattaaagatgattatagccaaaaatggcccagacacagaaaggttacctacatctcatacttgctttaatgtgcttttacttccggaatactcaagcaaagaaaaacttaaagagagattgttgaaggccatcacgtatgccaaaggatttggcatgctgtaaaacaaaacaaaacaaaataaaacaaaaaaaaggaaggaaaaaaaaagaaaaaatttaaaaaattttaaaaatataacgagggataaatttttggtggtgatagtgtcccagtacaaaaaggctgtaagatagtcaaccacagtagtcacctatgtctgtgcctcccttctttattggggacatgtgggctggaacagcagatttcagctacatatatgaacaaatcctttattattattataattatttttttgcgtgaaagtgttacatattctttcacttgtatgtacagagaggtttttctgaatatttattttaagggttaaatcacttttgcttgtgtttattactgcttgaggttgagccttttgagtatttaaaaaatatataccaacagaactactctcccaaggaaaatattgccaccatttgtagaccacgtaaccttcaagtatgtgctacttttttgtccctgtatctaactcaaatcaggaactgtattttttttaatgatttgcttttgaaacttgaagtcttgaaaacagtgtgatgcaattactgctgttctagcccccaaagagttttctgtgcaaaatcttgagaatcaatcaataaagaaagatggaaggaagggagaaattggaatgttttaactgcagccctcagaactttagtaacagcacaacaaattaaaaacaaaaacaactcatgccacagtatgtcgtcttcatgtgtcttgcaatgaactgtttcagtagccaatcctctttcttagtatatgaaaggacagggatttttgttcttgttgttctcgttgttgttttaagtttactggggaaagtgcatttggccaaatgaaatggtagtcaagcctattgcaacaaagttaggaagtttgttgtttgtttattataaacaaaaagcatgtgaaagtgcacttaagatagagtttttattaattacttacttattacctagattttaaatagacaatccaaagtctccccttcgtgttgccatcatcttgttgaatcagccattttatcgaggcacgtgatcagtgttgcaacataatgaaaaagatggctactgtgccttgtgttacttaatcatacagtaagctgacctggaaatgaatgaaactattactcctaagaattacattgtatagccccacagattaaatttaattaattaattcaaaacatgttaaacgttactttcatgtactatggaaaagtacaagtaggtttacattactgatttccagaagtaagtagtttcccctttcctagtcttctgtgtatgtgatgttgttaatttcttttattgcattataaaataaaaggattatgtatttttaactaaggtgagacattgatatatccttttgctacaagctatagctaatgtgctgagcttgtgccttggtgattgattgattgattgactgattgttttaactgattactgtagatcaacctgatgatttgtttgtttgaaattggcaggaaaaatgcagctttcaaatcattggggggagaaaaaggatgtctttcaggattattttaattaatttttttcataattgagacagaactgtttgttatgtaccataatgctaaataaaactgtggcacttttcaccataatttaatttagtggaaaaagaagacaatgctttccatattgtgataaggtaacatggggtttttctgggccagcctttagaacactgttagggtacatacgctaccttgatgaaagggaccttcgtgcaactgtagtcatcttaaaggcttctcatccactgtgcttcttaatgtgtaattaaagtgaggagaaattaaatactctgagggcgttttatataataaattcgtgaagaaatgtgtgctcttcagttctcaagttttattattatggtatttattaaagttctacaattgtaataacgtatccatatgacaagttttaaagtggtaattgaaataggttatcagatatagagttgttcacatcaagtagacttttaacagagtcagaatgaacctacccttaaaattttagagaaaaaaaatcgtcggttgcacagaatagctgctctagcttgcttaattatgccgggcatgttgtcactcctcttacttttgctgccttttcattactatttaatggaatgtccctgaacaataaggaagagcaaaacatagacattttgactacagtggatacttcctctaccccaaatgttatgttataaaagtactttttttgcccaggtactctattatatattttggttttctttgaattagacctcaatctccaggaagctctggagggaaaaaaaggaaccataaactaaagtaactggttttccaaataaatgtaaacttttttaaccttttattattatagaacatttcaaacatacataaaacatgaaaacagcctgcagccaaacttttctggaccttggcagctccagcaaatgagctggtcatcctaaccctggtttcctgagacaactacttttggggatgcttgcttgtatagggagatgatagatagatagatacatatcaaaaagaaacttgaaaaaggcttcgaacagaacttgccgatgttactcatccctcctcggtacagacattctgttagaacagatggttgtaatggggcagcatcactccctattcccattaaaaacatgaccattctgagatttcaggccccttcgaggaatttttctcaagaattccatacaaactgtcagaggaagaaatgtcgtcccaagactagtccctgtgtagtcttgatccctttacctgcttactgtaattttttttctctgactttccgccagtgtctaagggccatctgtacccctcccacccttccatgagccactgtataatccaaaaacacaccttccatttgctccctcacttgtctccttttacctcaacagtgttagtgtgtaaagaattgcctggggagggtagagggttttacaagtacagagtcccaagtcttttctcccctccccgttagtgggttggcatttattaataggcactgcaagattttgatgcaggtgtggggtagatatcactgtgaaaggctactaatgcatggtagtttcaccgaaagtacagtcttcaaggatccttataatctcctcattgccaaaatcagtaacatctataaccttgacaacaccctagcttgggctgttgcttctctggctacttgtttttccatcccagtttacccagattttagatggatactcctccaattctgcttaaagtccttacctgttcttgcccagttccctctagtcaacctcagtcactcccaaagattcttccccaatcccatatcttttgctcagacctctgtctctgggatttctttgttacctcatagtcagtagtcctaaaaacaaaattcttcatcttgcatctctatcgaccgaccattctttgtttctttttaagaaatgtaaccttcaccccaatcatcaaaatctctcattcctcaattgtcacaggttgtcacttctttccccctaaacctctcccatcattccttccttctttatactgcccttacaggtcctgatcctctgactcacccggacattcttagcagctgcctaatttcactccctgactctcatctccctcttccaatccttttcattgtgctagaacactatcttgctaattttaatatcctctgcattcagtgcctccacagattgccccctcactgacctttccaatttggccttgtgttacacactttcctcgctgcattcctacccagcatcttcacttgtcatatttctcaaatactcttcatgaccagatatttaaagtacctcatccatgaagacttcatcaacccccaaagtgcctccaatgcttccgtggtagcacagcataatggggtacatttcttagttgaacagtgaggagtcactgggattcttacagagtgtcttagggtctcctcttgatactctttccacatttcagttaaggaattttcttacatctttttttcttctaataacctttgcctggagtgtaagtaaattcatgatagagactgtcatttttaaaaaaaaaaacaaaccattttgcctttcacatgttattacctccatctttctgttatcttgtcagtgttgccacctaaatgattgaaaatgaccgagcatgcagtagaatgtagtgaagtttcctatttcatccattttttgcataagtgcattggtatctgtatatccatctgcccaagcaccagttgttgaaaagactattatttccccatgaatggtcctggtacccttgtcaaagaacagttgaccataaatataagactttctggattctcagtcttactccattgccctatatgtctgtcgttataccagcaccgcactgtcttgatggctgtagcttggtagtaagtttagatttgggatgtgcaagtcctccattttttttttttttttccccaaaatcattttgtctgttttgggtcccttgcattgcatatgaatttttatatgatcattgtgtcaattcctgcaaaacagctgggatcttgatagggatttagttgaattggtagataaatttgagaaataactgctattttaatggtgttaggttttctgttccatgactgtgggatgtctttgcatttgcttaggtctttatttcagtgatgttttagagatttcagtgtgcaagtcttgacgtctttaatttttttctaagtattttactgatgccactttaattatatgattattttctaatttttatttttgtattcatcactggtgttagaaataaaattaatttttgtatattgattttgtatattgtagcttttctaaaattctttttttgtcacttagtattttttgcatatgagatcatgcatctgtgaacagaaatacttttacttcttcctttccagtctagattcctattatttcattttcttgccttagtgtgctggctagcacctccagtacaatattggatagaagtgacaagagcagacatctttttcttgttcctgattttaaggggaaagcattcagtctttcaccattgagtatgatgttagctagctgtgggtttgcttcaagttgaggaaattcttttattaaacctagtttactgagtgttttttaatcaaaaaaaaaaaaaggaggggctgtgggttttgttaaatgcttcttctgtatcaagattttcatgttgttttgtcctttattaatatgttgtattaatggacttttgtatattgaattaactttgcattcctgggataatctcagttgtccatgctacataaaccttgttctatgctgctgga

SEQ ID NO: 102 - DNA, 8841 bp, Homo sapiens
  source 1..8841: mol_type = genomic DNA
agtcctcccgtcttgcgccgcggccgcgagatccgtgtgtctcccaagatggtggcgctgggctcggggtgactacaggagacgacggggccttttcccttcgccaggacccgacacaccaggcttcgctcgctcgcgcacccctccgccgcgtagccatccgccagcgcgggcgcccgccatccgccgcctacttacgcttcacctctgccgacccggcgcgctcggctgcgggcggcggcgcctccttcggctcctcctcggaatagctcgcggcctgtagcccctggcaggagggcccctcagccccccggtgtggacaggcagcggcggctggcgacgaacgccgggatttcggcggccccggcgctccctttcccggcctcgttttccggataaggaagcgcgggtcccgcatgagccccggcggtggcggcagcgaaagagaacgaggcggtggcgggcggaggcggcgggcgagggcgactacgaccagtgaggcggccgccgcagcccaggcgcgggggcgacgacaggttaaaaatctgtaagagcctgattttagaattcaccagctcctcagaagtttggcgaaatatgagttattaagcctacgctcagatcaaggtagcagctagactggtgtgacaacctgtttttaatcagtgactcaaagctgtgatcaccctgatgtcaccgaatggccacagcttgtaaaagatcaggagaacctcagtctgacgacattgaagctagccgaatacacaggagcccatgaaaggcatcacgtgtggaaggaagtgacacgagtcatagtctgccctgcttttctaccacctgaagcatcatataaacctatatcttctgtttcaaatgaagcgagcagctgcaaagcatctaatagaacgctactaccaccagttaactgagggctgtggaaatgaagcctgcacgaatgagttttgtgcttcctgtccaacttttcttcgtatggataataatgcagcagctattaaagccctcgagctttataagattaatgcaaaactctgtgatcctcatccctccaagaaaggagcaagctcagcttaccttgagaactcgaaaggtgcccccaacaactcctgctctgagataaaaatgaacaagaaaggcgctagaattgattttaaagatgtgacttacttaacagaagagaaggtatatgaaattcttgaattatgtagagaaagagaggattattcccctttaatccgtgttattggaagagttttttctagtgctgaggcattggtacagagcttccggaaagttaaacaacacaccaaggaagaactgaaatctcttcaagcaaaagatgaagacaaagatgaagatgaaaaggaaaaagctgcatgttctgctgctgctatggaagaagactcagaagcatcttcctcaaggataggtgatagctcacagggagacaacaatttgcaaaaattaggccctgatgatgtgtctgtggatattgatgccattagaagggtctacaccagattgctctctaatgaaaaaattgaaactgcctttctcaatgcacttgtatatttgtcacctaacgtggaatgtgacttgacgtatcacaatgtatactctcgagatcctaattatctgaatttgttcattatcgtaatggagaatagaaatctccacagtcctgaatatctggaaatggctttgccattattttgcaaagcgatgagcaagctaccccttgcagcccaaggaaaactgatcagactgtggtctaaatacaatgcagaccagattcggagaatgatggagacatttcagcaacttattacttataaagtcataagcaatgaatttaacagtcgaaatctagtgaatgatgatgatgccattgttgctgcttcgaagtgcttgaaaatggtttactatgcaaatgtagtgggaggggaagtggacacaaatcacaatgaagaagatgatgaagagcccatccctgagtccagcgagctgacacttcaggaacttttgggagaagaaagaagaaacaagaaaggtcctcgagtggaccccctggaaactgaacttggtgttaaaaccctggattgtcgaaaaccacttatcccttttgaagagtttattaatgaaccactgaatgaggttctagaaatggataaagattatacttttttcaaagtagaaacagagaacaaattctcttttatgacatgtccctttatattgaatgctgtcacaaagaatttgggattatattatgacaatagaattcgcatgtacagtgaacgaagaatcactgttctctacagcttagttcaaggacagcagttgaatccatatttgagactcaaagttagacgtgaccatatcatagatgatgcacttgtccggctagagatgatcgctatggaaaatcctgcagacttgaagaagcagttgtatgtggaatttgaaggagaacaaggagttgatgagggaggtgtttccaaagaattttttcagctggttgtggaggaaatcttcaatccagatattggtatgttcacatacgatgaatctacaaaattgttttggtttaatccatcttcttttgaaactgagggtcagtttactctgattggcatagtactgggtctggctatttacaataactgtatactggatgtacattttcccatggttgtctacaggaagctaatggggaaaaaaggaacttttcgtgacttgggagactctcacccagttctatatcagagtttaaaagatttattggagtatgaagggaatgtggaagatgacatgatgatcactttccagatatcacagacagatctttttggtaacccaatgatgtatgatctaaaggaaaatggtgataaaattccaattacaaatgaaaacaggaaggaatttgtcaatctttattctgactacattctcaataaatcagtagaaaaacagttcaaggcttttcggagaggttttcatatggtgaccaatgaatctcccttaaagtacttattcagaccagaagaaattgaattgcttatatgtggaagccggaatctagatttccaagcactagaagaaactacagaatatgacggtggctataccagggactctgttctgattagggagttctgggaaatcgttcattcatttacagatgaacagaaaagactcttcttgcagtttacaacgggcacagacagagcacctgtgggaggactaggaaaattaaagatgattatagccaaaaatggcccagacacagaaaggttacctacatctcatacttgctttaatgtgcttttacttccggaatactcaagcaaagaaaaacttaaagagagattgttgaaggccatcacgtatgccaaaggatttggcatgctgtaaaacaaaacaaaacaaaataaaacaaaaaaaaggaaggaaaaaaaaagaaaaaatttaaaaaattttaaaaatataacgagggataaatttttggtggtgatagtgtcccagtacaaaaaggctgtaagatagtcaaccacagtagtcacctatgtctgtgcctcccttctttattggggacatgtgggctggaacagcagatttcagctacatatatgaacaaatcctttattattattataattatttttttgcgtgaaagtgttacatattctttcacttgtatgtacagagaggtttttctgaatatttattttaagggttaaatcacttttgcttgtgtttattactgcttgaggttgagccttttgagtatttaaaaaatatataccaacagaactactctcccaaggaaaatattgccaccatttgtagaccacgtaaccttcaagtatgtgctacttttttgtccctgtatctaactcaaatcaggaactgtattttttttaatgatttgcttttgaaacttgaagtcttgaaaacagtgtgatgcaattactgctgttctagcccccaaagagttttctgtgcaaaatcttgagaatcaatcaataaagaaagatggaaggaagggagaaattggaatgttttaactgcagccctcagaactttagtaacagcacaacaaattaaaaacaaaaacaactcatgccacagtatgtcgtcttcatgtgtcttgcaatgaactgtttcagtagccaatcctctttcttagtatatgaaaggacagggatttttgttcttgttgttctcgttgttgttttaagtttactggggaaagtgcatttggccaaatgaaatggtagtcaagcctattgcaacaaagttaggaagtttgttgtttgtttattataaacaaaaagcatgtgaaagtgcacttaagatagagtttttattaattacttacttattacctagattttaaatagacaatccaaagtctccccttcgtgttgccatcatcttgttgaatcagccattttatcgaggcacgtgatcagtgttgcaacataatgaaaaagatggctactgtgccttgtgttacttaatcatacagtaagctgacctggaaatgaatgaaactattactcctaagaattacattgtatagccccacagattaaatttaattaattaattcaaaacatgttaaacgttactttcatgtactatggaaaagtacaagtaggtttacattactgatttccagaagtaagtagtttcccctttcctagtcttctgtgtatgtgatgttgttaatttcttttattgcattataaaataaaaggattatgtatttttaactaaggtgagacattgatatatccttttgctacaagctatagctaatgtgctgagcttgtgccttggtgattgattgattgattgactgattgttttaactgattactgtagatcaacctgatgatttgtttgtttgaaattggcaggaaaaatgcagctttcaaatcattggggggagaaaaaggatgtctttcaggattattttaattaatttttttcataattgagacagaactgtttgttatgtaccataatgctaaataaaactgtggcacttttcaccataatttaatttagtggaaaaagaagacaatgctttccatattgtgataaggtaacatggggtttttctgggccagcctttagaacactgttagggtacatacgctaccttgatgaaagggaccttcgtgcaactgtagtcatcttaaaggcttctcatccactgtgcttcttaatgtgtaattaaagtgaggagaaattaaatactctgagggcgttttatataataaattcgtgaagaaatgtgtgctcttcagttctcaagttttattattatggtatttattaaagttctacaattgtaataacgtatccatatgacaagttttaaagtggtaattgaaataggttatcagatatagagttgttcacatcaagtagacttttaacagagtcagaatgaacctacccttaaaattttagagaaaaaaaatcgtcggttgcacagaatagctgctctagcttgcttaattatgccgggcatgttgtcactcctcttacttttgctgccttttcattactatttaatggaatgtccctgaacaataaggaagagcaaaacatagacattttgactacagtggatacttcctctaccccaaatgttatgttataaaagtactttttttgcccaggtactctattatatattttggttttctttgaattagacctcaatctccaggaagctctggagggaaaaaaaggaaccataaactaaagtaactggttttccaaataaatgtaaacttttttaaccttttattattatagaacatttcaaacatacataaaacatgaaaacagcctgcagccaaacttttctggaccttggcagctccagcaaatgagctggtcatcctaaccctggtttcctgagacaactacttttggggatgcttgcttgtatagggagatgatagatagatagatacatatcaaaaagaaacttgaaaaaggcttcgaacagaacttgccgatgttactcatccctcctcggtacagacattctgttagaacagatggttgtaatggggcagcatcactccctattcccattaaaaacatgaccattctgagatttcaggccccttcgaggaatttttctcaagaattccatacaaactgtcagaggaagaaatgtcgtcccaagactagtccctgtgtagtcttgatccctttacctgcttactgtaattttttttctctgactttccgccagtgtctaagggccatctgtacccctcccacccttccatgagccactgtataatccaaaaacacaccttccatttgctccctcacttgtctccttttacctcaacagtgttagtgtgtaaagaattgcctggggagggtagagggttttacaagtacagagtcccaagtcttttctcccctccccgttagtgggttggcatttattaataggcactgcaagattttgatgcaggtgtggggtagatatcactgtgaaaggctactaatgcatggtagtttcaccgaaagtacagtcttcaaggatccttataatctcctcattgccaaaatcagtaacatctataaccttgacaacaccctagcttgggctgttgcttctctggctacttgtttttccatcccagtttacccagattttagatggatactcctccaattctgcttaaagtccttacctgttcttgcccagttccctctagtcaacctcagtcactcccaaagattcttccccaatcccatatcttttgctcagacctctgtctctgggatttctttgttacctcatagtcagtagtcctaaaaacaaaattcttcatcttgcatctctatcgaccgaccattctttgtttctttttaagaaatgtaaccttcaccccaatcatcaaaatctctcattcctcaattgtcacaggttgtcacttctttccccctaaacctctcccatcattccttccttctttatactgcccttacaggtcctgatcctctgactcacccggacattcttagcagctgcctaatttcactccctgactctcatctccctcttccaatccttttcattgtgctagaacactatcttgctaattttaatatcctctgcattcagtgcctccacagattgccccctcactgacctttccaatttggccttgtgttacacactttcctcgctgcattcctacccagcatcttcacttgtcatatttctcaaatactcttcatgaccagatatttaaagtacctcatccatgaagacttcatcaacccccaaagtgcctccaatgcttccgtggtagcacagcataatggggtacatttcttagttgaacagtgaggagtcactgggattcttacagagtgtcttagggtctcctcttgatactctttccacatttcagttaaggaattttcttacatctttttttcttctaataacctttgcctggagtgtaagtaaattcatgatagagactgtcatttttaaaaaaaaaaacaaaccattttgcctttcacatgttattacctccatctttctgttatcttgtcagtgttgccacctaaatgattgaaaatgaccgagcatgcagtagaatgtagtgaagtttcctatttcatccattttttgcataagtgcattggtatctgtatatccatctgcccaagcaccagttgttgaaaagactattatttccccatgaatggtcctggtacccttgtcaaagaacagttgaccataaatataagactttctggattctcagtcttactccattgccctatatgtctgtcgttataccagcaccgcactgtcttgatggctgtagcttggtagtaagtttagatttgggatgtgcaagtcctccattttttttttttttttccccaaaatcattttgtctgttttgggtcccttgcattgcatatgaatttttatatgatcattgtgtcaattcctgcaaaacagctgggatcttgatagggatttagttgaattggtagataaatttgagaaataactgctattttaatggtgttaggttttctgttccatgactgtgggatgtctttgcatttgcttaggtctttatttcagtgatgttttagagatttcagtgtgcaagtcttgacgtctttaatttttttctaagtattttactgatgccactttaattatatgattattttctaatttttatttttgtattcatcactggtgttagaaataaaattaatttttgtatattgattttgtatattgtagcttttctaaaattctttttttgtcacttagtattttttgcatatgagatcatgcatctgtgaacagaaatacttttacttcttcctttccagtctagattcctattatttcattttcttgccttagtgtgctggctagcacctccagtacaatattggatagaagtgacaagagcagacatctttttcttgttcctgattttaaggggaaagcattcagtctttcaccattgagtatgatgttagctagctgtgggtttgcttcaagttgaggaaattcttttattaaacctagtttactgagtgttttttaatcaaaaaaaaaaaaaggaggggctgtgggttttgttaaatgcttcttctgtatcaagattttcatgttgttttgtcctttattaatatgttgtattaatggacttttgtatattgaattaactttgcattcctgggataatctcagttgtccatgctacataaaccttgttctatgctgctgga

SEQ ID NO: 103 - DNA, 5124 bp, Homo sapiens
  source 1..5124: mol_type = genomic DNA
ggggcggggcgggacgtgcgaggcgtcgagatttgggcctcctaggagccaggctcttcgagccagccggggccccagacagggaagggcaggccctttccttcaaaggggagccctttctcggcgttttcaaggtttttggctctcttggggaagacatatttagccgtgtgcttggttaaaaatctgtaagagcctgattttagaattcaccagctcctcagaagtttggcgaaatatgagttattaagcctacgctcagatcaaggtagcagctagactggtgtgacaacctgtttttaatcagtgactcaaagctgtgatcaccctgatgtcaccgaatggccacagcttgtaaaagagagttacagtggaggtaaaaggagtggcttgcaggatggagaagctgcaccagtgttattggaatgccagcaggtttattttttgttttgcaagccagctctgcctccttacagtatgacatctgatgctggagggtcgcactttcaaaaatgagtcagctggtacatggggttatcatcaatttttagctcttctgtctgggagatacaagtttggaagcaatcttggggtacttacccacaaggctggtggagaccagatcaggagaacctcagtctgacgacattgaagctagccgaatgaagcgagcagctgcaaagcatctaatagaacgctactaccaccagttaactgagggctgtggaaatgaagcctgcacgaatgagttttgtgcttcctgtccaacttttcttcgtatggataataatgcagcagctattaaagccctcgagctttataagattaatgcaaaactctgtgatcctcatccctccaagaaaggagcaagctcagcttaccttgagaactcgaaaggtgcccccaacaactcctgctctgagataaaaatgaacaagaaaggcgctagaattgattttaaagatgtgacttacttaacagaagagaaggtatatgaaattcttgaattatgtagagaaagagaggattattcccctttaatccgtgttattggaagagttttttctagtgctgaggcattggtacagagcttccggaaagttaaacaacacaccaaggaagaactgaaatctcttcaagcaaaagatgaagacaaagatgaagatgaaaaggaaaaagctgcatgttctgctgctgctatggaagaagactcagaagcatcttcctcaaggataggtgatagctcacagggagacaacaatttgcaaaaattaggccctgatgatgtgtctgtggatattgatgccattagaagggtctacaccagattgctctctaatgaaaaaattgaaactgcctttctcaatgcacttgtatatttgtcacctaacgtggaatgtgacttgacgtatcacaatgtatactctcgagatcctaattatctgaatttgttcattatcgtaatggagaatagaaatctccacagtcctgaatatctggaaatggctttgccattattttgcaaagcgatgagcaagctaccccttgcagcccaaggaaaactgatcagactgtggtctaaatacaatgcagaccagattcggagaatgatggagacatttcagcaacttattacttataaagtcataagcaatgaatttaacagtcgaaatctagtgaatgatgatgatgccattgttgctgcttcgaagtgcttgaaaatggtttactatgcaaatgtagtgggaggggaagtggacacaaatcacaatgaagaagatgatgaagagcccatccctgagtccagcgagctgacacttcaggaacttttgggagaagaaagaagaaacaagaaaggtcctcgagtggaccccctggaaactgaacttggtgttaaaaccctggattgtcgaaaaccacttatcccttttgaagagtttattaatgaaccactgaatgaggttctagaaatggataaagattatacttttttcaaagtagaaacagagaacaaattctcttttatgacatgtccctttatattgaatgctgtcacaaagaatttgggattatattatgacaatagaattcgcatgtacagtgaacgaagaatcactgttctctacagcttagttcaaggacagcagttgaatccatatttgagactcaaagttagacgtgaccatatcatagatgatgcacttgtccggctagagatgatcgctatggaaaatcctgcagacttgaagaagcagttgtatgtggaatttgaaggagaacaaggagttgatgagggaggtgtttccaaagaattttttcagctggttgtggaggaaatcttcaatccagatattggtatgttcacatacgatgaatctacaaaattgttttggtttaatccatcttcttttgaaactgagggtcagtttactctgattggcatagtactgggtctggctatttacaataactgtatactggatgtacattttcccatggttgtctacaggaagctaatggggaaaaaaggaacttttcgtgacttgggagactctcacccagttctatatcagagtttaaaagatttattggagtatgaagggaatgtggaagatgacatgatgatcactttccagatatcacagacagatctttttggtaacccaatgatgtatgatctaaaggaaaatggtgataaaattccaattacaaatgaaaacaggaaggaatttgtcaatctttattctgactacattctcaataaatcagtagaaaaacagttcaaggcttttcggagaggttttcatatggtgaccaatgaatctcccttaaagtacttattcagaccagaagaaattgaattgcttatatgtggaagccggaatctagatttccaagcactagaagaaactacagaatatgacggtggctataccagggactctgttctgattagggagttctgggaaatcgttcattcatttacagatgaacagaaaagactcttcttgcagtttacaacgggcacagacagagcacctgtgggaggactaggaaaattaaagatgattatagccaaaaatggcccagacacagaaaggttacctacatctcatacttgctttaatgtgcttttacttccggaatactcaagcaaagaaaaacttaaagagagattgttgaaggccatcacgtatgccaaaggatttggcatgctgtaaaacaaaacaaaacaaaataaaacaaaaaaaaggaaggaaaaaaaaagaaaaaatttaaaaaattttaaaaatataacgagggataaatttttggtggtgatagtgtcccagtacaaaaaggctgtaagatagtcaaccacagtagtcacctatgtctgtgcctcccttctttattggggacatgtgggctggaacagcagatttcagctacatatatgaacaaatcctttattattattataattatttttttgcgtgaaagtgttacatattctttcacttgtatgtacagagaggtttttctgaatatttattttaagggttaaatcacttttgcttgtgtttattactgcttgaggttgagccttttgagtatttaaaaaatatataccaacagaactactctcccaaggaaaatattgccaccatttgtagaccacgtaaccttcaagtatgtgctacttttttgtccctgtatctaactcaaatcaggaactgtattttttttaatgatttgcttttgaaacttgaagtcttgaaaacagtgtgatgcaattactgctgttctagcccccaaagagttttctgtgcaaaatcttgagaatcaatcaataaagaaagatggaaggaagggagaaattggaatgttttaactgcagccctcagaactttagtaacagcacaacaaattaaaaacaaaaacaactcatgccacagtatgtcgtcttcatgtgtcttgcaatgaactgtttcagtagccaatcctctttcttagtatatgaaaggacagggatttttgttcttgttgttctcgttgttgttttaagtttactggggaaagtgcatttggccaaatgaaatggtagtcaagcctattgcaacaaagttaggaagtttgttgtttgtttattataaacaaaaagcatgtgaaagtgcacttaagatagagtttttattaattacttacttattacctagattttaaatagacaatccaaagtctccccttcgtgttgccatcatcttgttgaatcagccattttatcgaggcacgtgatcagtgttgcaacataatgaaaaagatggctactgtgccttgtgttacttaatcatacagtaagctgacctggaaatgaatgaaactattactcctaagaattacattgtatagccccacagattaaatttaattaattaattcaaaacatgttaaacgttactttcatgtactatggaaaagtacaagtaggtttacattactgatttccagaagtaagtagtttcccctttcctagtcttctgtgtatgtgatgttgttaatttcttttattgcattataaaataaaaggattatgtatttttaactaaggtgagacattgatatatccttttgctacaagctatagctaatgtgctgagcttgtgccttggtgattgattgattgattgactgattgttttaactgattactgtagatcaacctgatgatttgtttgtttgaaattggcaggaaaaatgcagctttcaaatcattggggggagaaaaaggatgtctttcaggattattttaattaatttttttcataattgagacagaactgtttgttatgtaccataatgctaaataaaactgtggcacttttcaccataatttaatttagtggaaaaagaagacaatgctttccatattgtgataaggtaacatggggtttttctgggccagcctttagaacactgttagggtacatacgctaccttgatgaaagggaccttcgtgcaactgtagtcatcttaaaggcttctcatccactgtgcttcttaatgtgtaattaaagtgaggagaaattaaatactctgagggcgttttatataataaattcgtgaagaaatgtgtgctcttca

SEQ ID NO: 104 - DNA, 8764 bp, Homo sapiens
  source 1..8764: mol_type = genomic DNA
agtcctcccgtcttgcgccgcggccgcgagatccgtgtgtctcccaagatggtggcgctgggctcggggtgactacaggagacgacggggccttttcccttcgccaggacccgacacaccaggcttcgctcgctcgcgcacccctccgccgcgtagccatccgccagcgcgggcgcccgccatccgccgcctacttacgcttcacctctgccgacccggcgcgctcggctgcgggcggcggcgcctccttcggctcctcctcggaatagctcgcggcctgtagcccctggcaggagggcccctcagccccccggtgtggacaggcagcggcggctggcgacgaacgccgggatttcggcggccccggcgctccctttcccggcctcgttttccggataaggaagcgcgggtcccgcatgagccccggcggtggcggcagcgaaagagaacgaggcggtggcgggcggaggcggcgggcgagggcgactacgaccagtgaggcggccgccgcagcccaggcgcgggggcgacgacagggtaaataccttaaattggaattactgggtcacatggttaaaaatctgtaagagcctgattttagaattcaccagctcctcagaagtttggcgaaatatgagttattaagcctacgctcagatcaaggtagcagctagactggtgtgacaacctgtttttaatcagtgactcaaagctgtgatcaccctgatgtcaccgaatggccacagcttgtaaaagatcaggagaacctcagtctgacgacattgaagctagccgaatgaagcgagcagctgcaaagcatctaatagaacgctactaccaccagttaactgagggctgtggaaatgaagcctgcacgaatgagttttgtgcttcctgtccaacttttcttcgtatggataataatgcagcagctattaaagccctcgagctttataagattaatgcaaaactctgtgatcctcatccctccaagaaaggagcaagctcagcttaccttgagaactcgaaaggtgcccccaacaactcctgctctgagataaaaatgaacaagaaaggcgctagaattgattttaaagatgtgacttacttaacagaagagaaggtatatgaaattcttgaattatgtagagaaagagaggattattcccctttaatccgtgttattggaagagttttttctagtgctgaggcattggtacagagcttccggaaagttaaacaacacaccaaggaagaactgaaatctcttcaagcaaaagatgaagacaaagatgaagatgaaaaggaaaaagctgcatgttctgctgctgctatggaagaagactcagaagcatcttcctcaaggataggtgatagctcacagggagacaacaatttgcaaaaattaggccctgatgatgtgtctgtggatattgatgccattagaagggtctacaccagattgctctctaatgaaaaaattgaaactgcctttctcaatgcacttgtatatttgtcacctaacgtggaatgtgacttgacgtatcacaatgtatactctcgagatcctaattatctgaatttgttcattatcgtaatggagaatagaaatctccacagtcctgaatatctggaaatggctttgccattattttgcaaagcgatgagcaagctaccccttgcagcccaaggaaaactgatcagactgtggtctaaatacaatgcagaccagattcggagaatgatggagacatttcagcaacttattacttataaagtcataagcaatgaatttaacagtcgaaatctagtgaatgatgatgatgccattgttgctgcttcgaagtgcttgaaaatggtttactatgcaaatgtagtgggaggggaagtggacacaaatcacaatgaagaagatgatgaagagcccatccctgagtccagcgagctgacacttcaggaacttttgggagaagaaagaagaaacaagaaaggtcctcgagtggaccccctggaaactgaacttggtgttaaaaccctggattgtcgaaaaccacttatcccttttgaagagtttattaatgaaccactgaatgaggttctagaaatggataaagattatacttttttcaaagtagaaacagagaacaaattctcttttatgacatgtccctttatattgaatgctgtcacaaagaatttgggattatattatgacaatagaattcgcatgtacagtgaacgaagaatcactgttctctacagcttagttcaaggacagcagttgaatccatatttgagactcaaagttagacgtgaccatatcatagatgatgcacttgtccggctagagatgatcgctatggaaaatcctgcagacttgaagaagcagttgtatgtggaatttgaaggagaacaaggagttgatgagggaggtgtttccaaagaattttttcagctggttgtggaggaaatcttcaatccagatattggtatgttcacatacgatgaatctacaaaattgttttggtttaatccatcttcttttgaaactgagggtcagtttactctgattggcatagtactgggtctggctatttacaataactgtatactggatgtacattttcccatggttgtctacaggaagctaatggggaaaaaaggaacttttcgtgacttgggagactctcacccagttctatatcagagtttaaaagatttattggagtatgaagggaatgtggaagatgacatgatgatcactttccagatatcacagacagatctttttggtaacccaatgatgtatgatctaaaggaaaatggtgataaaattccaattacaaatgaaaacaggaaggaatttgtcaatctttattctgactacattctcaataaatcagtagaaaaacagttcaaggcttttcggagaggttttcatatggtgaccaatgaatctcccttaaagtacttattcagaccagaagaaattgaattgcttatatgtggaagccggaatctagatttccaagcactagaagaaactacagaatatgacggtggctataccagggactctgttctgattagggagttctgggaaatcgttcattcatttacagatgaacagaaaagactcttcttgcagtttacaacgggcacagacagagcacctgtgggaggactaggaaaattaaagatgattatagccaaaaatggcccagacacagaaaggttacctacatctcatacttgctttaatgtgcttttacttccggaatactcaagcaaagaaaaacttaaagagagattgttgaaggccatcacgtatgccaaaggatttggcatgctgtaaaacaaaacaaaacaaaataaaacaaaaaaaaggaaggaaaaaaaaagaaaaaatttaaaaaattttaaaaatataacgagggataaatttttggtggtgatagtgtcccagtacaaaaaggctgtaagatagtcaaccacagtagtcacctatgtctgtgcctcccttctttattggggacatgtgggctggaacagcagatttcagctacatatatgaacaaatcctttattattattataattatttttttgcgtgaaagtgttacatattctttcacttgtatgtacagagaggtttttctgaatatttattttaagggttaaatcacttttgcttgtgtttattactgcttgaggttgagccttttgagtatttaaaaaatatataccaacagaactactctcccaaggaaaatattgccaccatttgtagaccacgtaaccttcaagtatgtgctacttttttgtccctgtatctaactcaaatcaggaactgtattttttttaatgatttgcttttgaaacttgaagtcttgaaaacagtgtgatgcaattactgctgttctagcccccaaagagttttctgtgcaaaatcttgagaatcaatcaataaagaaagatggaaggaagggagaaattggaatgttttaactgcagccctcagaactttagtaacagcacaacaaattaaaaacaaaaacaactcatgccacagtatgtcgtcttcatgtgtcttgcaatgaactgtttcagtagccaatcctctttcttagtatatgaaaggacagggatttttgttcttgttgttctcgttgttgttttaagtttactggggaaagtgcatttggccaaatgaaatggtagtcaagcctattgcaacaaagttaggaagtttgttgtttgtttattataaacaaaaagcatgtgaaagtgcacttaagatagagtttttattaattacttacttattacctagattttaaatagacaatccaaagtctccccttcgtgttgccatcatcttgttgaatcagccattttatcgaggcacgtgatcagtgttgcaacataatgaaaaagatggctactgtgccttgtgttacttaatcatacagtaagctgacctggaaatgaatgaaactattactcctaagaattacattgtatagccccacagattaaatttaattaattaattcaaaacatgttaaacgttactttcatgtactatggaaaagtacaagtaggtttacattactgatttccagaagtaagtagtttcccctttcctagtcttctgtgtatgtgatgttgttaatttcttttattgcattataaaataaaaggattatgtatttttaactaaggtgagacattgatatatccttttgctacaagctatagctaatgtgctgagcttgtgccttggtgattgattgattgattgactgattgttttaactgattactgtagatcaacctgatgatttgtttgtttgaaattggcaggaaaaatgcagctttcaaatcattggggggagaaaaaggatgtctttcaggattattttaattaatttttttcataattgagacagaactgtttgttatgtaccataatgctaaataaaactgtggcacttttcaccataatttaatttagtggaaaaagaagacaatgctttccatattgtgataaggtaacatggggtttttctgggccagcctttagaacactgttagggtacatacgctaccttgatgaaagggaccttcgtgcaactgtagtcatcttaaaggcttctcatccactgtgcttcttaatgtgtaattaaagtgaggagaaattaaatactctgagggcgttttatataataaattcgtgaagaaatgtgtgctcttcagttctcaagttttattattatggtatttattaaagttctacaattgtaataacgtatccatatgacaagttttaaagtggtaattgaaataggttatcagatatagagttgttcacatcaagtagacttttaacagagtcagaatgaacctacccttaaaattttagagaaaaaaaatcgtcggttgcacagaatagctgctctagcttgcttaattatgccgggcatgttgtcactcctcttacttttgctgccttttcattactatttaatggaatgtccctgaacaataaggaagagcaaaacatagacattttgactacagtggatacttcctctaccccaaatgttatgttataaaagtactttttttgcccaggtactctattatatattttggttttctttgaattagacctcaatctccaggaagctctggagggaaaaaaaggaaccataaactaaagtaactggttttccaaataaatgtaaacttttttaaccttttattattatagaacatttcaaacatacataaaacatgaaaacagcctgcagccaaacttttctggaccttggcagctccagcaaatgagctggtcatcctaaccctggtttcctgagacaactacttttggggatgcttgcttgtatagggagatgatagatagatagatacatatcaaaaagaaacttgaaaaaggcttcgaacagaacttgccgatgttactcatccctcctcggtacagacattctgttagaacagatggttgtaatggggcagcatcactccctattcccattaaaaacatgaccattctgagatttcaggccccttcgaggaatttttctcaagaattccatacaaactgtcagaggaagaaatgtcgtcccaagactagtccctgtgtagtcttgatccctttacctgcttactgtaattttttttctctgactttccgccagtgtctaagggccatctgtacccctcccacccttccatgagccactgtataatccaaaaacacaccttccatttgctccctcacttgtctccttttacctcaacagtgttagtgtgtaaagaattgcctggggagggtagagggttttacaagtacagagtcccaagtcttttctcccctccccgttagtgggttggcatttattaataggcactgcaagattttgatgcaggtgtggggtagatatcactgtgaaaggctactaatgcatggtagtttcaccgaaagtacagtcttcaaggatccttataatctcctcattgccaaaatcagtaacatctataaccttgacaacaccctagcttgggctgttgcttctctggctacttgtttttccatcccagtttacccagattttagatggatactcctccaattctgcttaaagtccttacctgttcttgcccagttccctctagtcaacctcagtcactcccaaagattcttccccaatcccatatcttttgctcagacctctgtctctgggatttctttgttacctcatagtcagtagtcctaaaaacaaaattcttcatcttgcatctctatcgaccgaccattctttgtttctttttaagaaatgtaaccttcaccccaatcatcaaaatctctcattcctcaattgtcacaggttgtcacttctttccccctaaacctctcccatcattccttccttctttatactgcccttacaggtcctgatcctctgactcacccggacattcttagcagctgcctaatttcactccctgactctcatctccctcttccaatccttttcattgtgctagaacactatcttgctaattttaatatcctctgcattcagtgcctccacagattgccccctcactgacctttccaatttggccttgtgttacacactttcctcgctgcattcctacccagcatcttcacttgtcatatttctcaaatactcttcatgaccagatatttaaagtacctcatccatgaagacttcatcaacccccaaagtgcctccaatgcttccgtggtagcacagcataatggggtacatttcttagttgaacagtgaggagtcactgggattcttacagagtgtcttagggtctcctcttgatactctttccacatttcagttaaggaattttcttacatctttttttcttctaataacctttgcctggagtgtaagtaaattcatgatagagactgtcatttttaaaaaaaaaaacaaaccattttgcctttcacatgttattacctccatctttctgttatcttgtcagtgttgccacctaaatgattgaaaatgaccgagcatgcagtagaatgtagtgaagtttcctatttcatccattttttgcataagtgcattggtatctgtatatccatctgcccaagcaccagttgttgaaaagactattatttccccatgaatggtcctggtacccttgtcaaagaacagttgaccataaatataagactttctggattctcagtcttactccattgccctatatgtctgtcgttataccagcaccgcactgtcttgatggctgtagcttggtagtaagtttagatttgggatgtgcaagtcctccattttttttttttttttccccaaaatcattttgtctgttttgggtcccttgcattgcatatgaatttttatatgatcattgtgtcaattcctgcaaaacagctgggatcttgatagggatttagttgaattggtagataaatttgagaaataactgctattttaatggtgttaggttttctgttccatgactgtgggatgtctttgcatttgcttaggtctttatttcagtgatgttttagagatttcagtgtgcaagtcttgacgtctttaatttttttctaagtattttactgatgccactttaattatatgattattttctaatttttatttttgtattcatcactggtgttagaaataaaattaatttttgtatattgattttgtatattgtagcttttctaaaattctttttttgtcacttagtattttttgcatatgagatcatgcatctgtgaacagaaatacttttacttcttcctttccagtctagattcctattatttcattttcttgccttagtgtgctggctagcacctccagtacaatattggatagaagtgacaagagcagacatctttttcttgttcctgattttaaggggaaagcattcagtctttcaccattgagtatgatgttagctagctgtgggtttgcttcaagttgaggaaattcttttattaaacctagtttactgagtgttttttaatcaaaaaaaaaaaaaggaggggctgtgggttttgttaaatgcttcttctgtatcaagattttcatgttgttttgtcctttattaatatgttgtattaatggacttttgtatattgaattaactttgcattcctgggataatctcagttgtccatgctacataaaccttgttctatgctgctgga

SEQ ID NO: 105 - DNA, 8799 bp, Homo sapiens
  source 1..8799: mol_type = genomic DNA
agtcctcccgtcttgcgccgcggccgcgagatccgtgtgtctcccaagatggtggcgctgggctcggggtgactacaggagacgacggggccttttcccttcgccaggacccgacacaccaggcttcgctcgctcgcgcacccctccgccgcgtagccatccgccagcgcgggcgcccgccatccgccgcctacttacgcttcacctctgccgacccggcgcgctcggctgcgggcggcggcgcctccttcggctcctcctcggaatagctcgcggcctgtagcccctggcaggagggcccctcagccccccggtgtggacaggcagcggcggctggcgacgaacgccgggatttcggcggccccggcgctccctttcccggcctcgttttccggataaggaagcgcgggtcccgcatgagccccggcggtggcggcagcgaaagagaacgaggcggtggcgggcggaggcggcgggcgagggcgactacgaccagtgaggcggccgccgcagcccaggcgcgggggcgacgacaggttaaaaatctgtaagagcctgattttagaattcaccagctcctcagaagtttggcgaaatatgagttattaagcctacgctcagatcaaggtagcagctagactggtgtgacaacctgtttttaatcagtgactcaaagctgtgatcaccctgatgtcaccgaatggccacagcttgtaaaagctcttctgtctgggagatacaagtttggaagcaatcttggggtacttacccacaaggctggtggagaccagatcaggagaacctcagtctgacgacattgaagctagccgaatgaagcgagcagctgcaaagcatctaatagaacgctactaccaccagttaactgagggctgtggaaatgaagcctgcacgaatgagttttgtgcttcctgtccaacttttcttcgtatggataataatgcagcagctattaaagccctcgagctttataagattaatgcaaaactctgtgatcctcatccctccaagaaaggagcaagctcagcttaccttgagaactcgaaaggtgcccccaacaactcctgctctgagataaaaatgaacaagaaaggcgctagaattgattttaaagatgtgacttacttaacagaagagaaggtatatgaaattcttgaattatgtagagaaagagaggattattcccctttaatccgtgttattggaagagttttttctagtgctgaggcattggtacagagcttccggaaagttaaacaacacaccaaggaagaactgaaatctcttcaagcaaaagatgaagacaaagatgaagatgaaaaggaaaaagctgcatgttctgctgctgctatggaagaagactcagaagcatcttcctcaaggataggtgatagctcacagggagacaacaatttgcaaaaattaggccctgatgatgtgtctgtggatattgatgccattagaagggtctacaccagattgctctctaatgaaaaaattgaaactgcctttctcaatgcacttgtatatttgtcacctaacgtggaatgtgacttgacgtatcacaatgtatactctcgagatcctaattatctgaatttgttcattatcgtaatggagaatagaaatctccacagtcctgaatatctggaaatggctttgccattattttgcaaagcgatgagcaagctaccccttgcagcccaaggaaaactgatcagactgtggtctaaatacaatgcagaccagattcggagaatgatggagacatttcagcaacttattacttataaagtcataagcaatgaatttaacagtcgaaatctagtgaatgatgatgatgccattgttgctgcttcgaagtgcttgaaaatggtttactatgcaaatgtagtgggaggggaagtggacacaaatcacaatgaagaagatgatgaagagcccatccctgagtccagcgagctgacacttcaggaacttttgggagaagaaagaagaaacaagaaaggtcctcgagtggaccccctggaaactgaacttggtgttaaaaccctggattgtcgaaaaccacttatcccttttgaagagtttattaatgaaccactgaatgaggttctagaaatggataaagattatacttttttcaaagtagaaacagagaacaaattctcttttatgacatgtccctttatattgaatgctgtcacaaagaatttgggattatattatgacaatagaattcgcatgtacagtgaacgaagaatcactgttctctacagcttagttcaaggacagcagttgaatccatatttgagactcaaagttagacgtgaccatatcatagatgatgcacttgtccggctagagatgatcgctatggaaaatcctgcagacttgaagaagcagttgtatgtggaatttgaaggagaacaaggagttgatgagggaggtgtttccaaagaattttttcagctggttgtggaggaaatcttcaatccagatattggtatgttcacatacgatgaatctacaaaattgttttggtttaatccatcttcttttgaaactgagggtcagtttactctgattggcatagtactgggtctggctatttacaataactgtatactggatgtacattttcccatggttgtctacaggaagctaatggggaaaaaaggaacttttcgtgacttgggagactctcacccagttctatatcagagtttaaaagatttattggagtatgaagggaatgtggaagatgacatgatgatcactttccagatatcacagacagatctttttggtaacccaatgatgtatgatctaaaggaaaatggtgataaaattccaattacaaatgaaaacaggaaggaatttgtcaatctttattctgactacattctcaataaatcagtagaaaaacagttcaaggcttttcggagaggttttcatatggtgaccaatgaatctcccttaaagtacttattcagaccagaagaaattgaattgcttatatgtggaagccggaatctagatttccaagcactagaagaaactacagaatatgacggtggctataccagggactctgttctgattagggagttctgggaaatcgttcattcatttacagatgaacagaaaagactcttcttgcagtttacaacgggcacagacagagcacctgtgggaggactaggaaaattaaagatgattatagccaaaaatggcccagacacagaaaggttacctacatctcatacttgctttaatgtgcttttacttccggaatactcaagcaaagaaaaacttaaagagagattgttgaaggccatcacgtatgccaaaggatttggcatgctgtaaaacaaaacaaaacaaaataaaacaaaaaaaaggaaggaaaaaaaaagaaaaaatttaaaaaattttaaaaatataacgagggataaatttttggtggtgatagtgtcccagtacaaaaaggctgtaagatagtcaaccacagtagtcacctatgtctgtgcctcccttctttattggggacatgtgggctggaacagcagatttcagctacatatatgaacaaatcctttattattattataattatttttttgcgtgaaagtgttacatattctttcacttgtatgtacagagaggtttttctgaatatttattttaagggttaaatcacttttgcttgtgtttattactgcttgaggttgagccttttgagtatttaaaaaatatataccaacagaactactctcccaaggaaaatattgccaccatttgtagaccacgtaaccttcaagtatgtgctacttttttgtccctgtatctaactcaaatcaggaactgtattttttttaatgatttgcttttgaaacttgaagtcttgaaaacagtgtgatgcaattactgctgttctagcccccaaagagttttctgtgcaaaatcttgagaatcaatcaataaagaaagatggaaggaagggagaaattggaatgttttaactgcagccctcagaactttagtaacagcacaacaaattaaaaacaaaaacaactcatgccacagtatgtcgtcttcatgtgtcttgcaatgaactgtttcagtagccaatcctctttcttagtatatgaaaggacagggatttttgttcttgttgttctcgttgttgttttaagtttactggggaaagtgcatttggccaaatgaaatggtagtcaagcctattgcaacaaagttaggaagtttgttgtttgtttattataaacaaaaagcatgtgaaagtgcacttaagatagagtttttattaattacttacttattacctagattttaaatagacaatccaaagtctccccttcgtgttgccatcatcttgttgaatcagccattttatcgaggcacgtgatcagtgttgcaacataatgaaaaagatggctactgtgccttgtgttacttaatcatacagtaagctgacctggaaatgaatgaaactattactcctaagaattacattgtatagccccacagattaaatttaattaattaattcaaaacatgttaaacgttactttcatgtactatggaaaagtacaagtaggtttacattactgatttccagaagtaagtagtttcccctttcctagtcttctgtgtatgtgatgttgttaatttcttttattgcattataaaataaaaggattatgtatttttaactaaggtgagacattgatatatccttttgctacaagctatagctaatgtgctgagcttgtgccttggtgattgattgattgattgactgattgttttaactgattactgtagatcaacctgatgatttgtttgtttgaaattggcaggaaaaatgcagctttcaaatcattggggggagaaaaaggatgtctttcaggattattttaattaatttttttcataattgagacagaactgtttgttatgtaccataatgctaaataaaactgtggcacttttcaccataatttaatttagtggaaaaagaagacaatgctttccatattgtgataaggtaacatggggtttttctgggccagcctttagaacactgttagggtacatacgctaccttgatgaaagggaccttcgtgcaactgtagtcatcttaaaggcttctcatccactgtgcttcttaatgtgtaattaaagtgaggagaaattaaatactctgagggcgttttatataataaattcgtgaagaaatgtgtgctcttcagttctcaagttttattattatggtatttattaaagttctacaattgtaataacgtatccatatgacaagttttaaagtggtaattgaaataggttatcagatatagagttgttcacatcaagtagacttttaacagagtcagaatgaacctacccttaaaattttagagaaaaaaaatcgtcggttgcacagaatagctgctctagcttgcttaattatgccgggcatgttgtcactcctcttacttttgctgccttttcattactatttaatggaatgtccctgaacaataaggaagagcaaaacatagacattttgactacagtggatacttcctctaccccaaatgttatgttataaaagtactttttttgcccaggtactctattatatattttggttttctttgaattagacctcaatctccaggaagctctggagggaaaaaaaggaaccataaactaaagtaactggttttccaaataaatgtaaacttttttaaccttttattattatagaacatttcaaacatacataaaacatgaaaacagcctgcagccaaacttttctggaccttggcagctccagcaaatgagctggtcatcctaaccctggtttcctgagacaactacttttggggatgcttgcttgtatagggagatgatagatagatagatacatatcaaaaagaaacttgaaaaaggcttcgaacagaacttgccgatgttactcatccctcctcggtacagacattctgttagaacagatggttgtaatggggcagcatcactccctattcccattaaaaacatgaccattctgagatttcaggccccttcgaggaatttttctcaagaattccatacaaactgtcagaggaagaaatgtcgtcccaagactagtccctgtgtagtcttgatccctttacctgcttactgtaattttttttctctgactttccgccagtgtctaagggccatctgtacccctcccacccttccatgagccactgtataatccaaaaacacaccttccatttgctccctcacttgtctccttttacctcaacagtgttagtgtgtaaagaattgcctggggagggtagagggttttacaagtacagagtcccaagtcttttctcccctccccgttagtgggttggcatttattaataggcactgcaagattttgatgcaggtgtggggtagatatcactgtgaaaggctactaatgcatggtagtttcaccgaaagtacagtcttcaaggatccttataatctcctcattgccaaaatcagtaacatctataaccttgacaacaccctagcttgggctgttgcttctctggctacttgtttttccatcccagtttacccagattttagatggatactcctccaattctgcttaaagtccttacctgttcttgcccagttccctctagtcaacctcagtcactcccaaagattcttccccaatcccatatcttttgctcagacctctgtctctgggatttctttgttacctcatagtcagtagtcctaaaaacaaaattcttcatcttgcatctctatcgaccgaccattctttgtttctttttaagaaatgtaaccttcaccccaatcatcaaaatctctcattcctcaattgtcacaggttgtcacttctttccccctaaacctctcccatcattccttccttctttatactgcccttacaggtcctgatcctctgactcacccggacattcttagcagctgcctaatttcactccctgactctcatctccctcttccaatccttttcattgtgctagaacactatcttgctaattttaatatcctctgcattcagtgcctccacagattgccccctcactgacctttccaatttggccttgtgttacacactttcctcgctgcattcctacccagcatcttcacttgtcatatttctcaaatactcttcatgaccagatatttaaagtacctcatccatgaagacttcatcaacccccaaagtgcctccaatgcttccgtggtagcacagcataatggggtacatttcttagttgaacagtgaggagtcactgggattcttacagagtgtcttagggtctcctcttgatactctttccacatttcagttaaggaattttcttacatctttttttcttctaataacctttgcctggagtgtaagtaaattcatgatagagactgtcatttttaaaaaaaaaaacaaaccattttgcctttcacatgttattacctccatctttctgttatcttgtcagtgttgccacctaaatgattgaaaatgaccgagcatgcagtagaatgtagtgaagtttcctatttcatccattttttgcataagtgcattggtatctgtatatccatctgcccaagcaccagttgttgaaaagactattatttccccatgaatggtcctggtacccttgtcaaagaacagttgaccataaatataagactttctggattctcagtcttactccattgccctatatgtctgtcgttataccagcaccgcactgtcttgatggctgtagcttggtagtaagtttagatttgggatgtgcaagtcctccattttttttttttttttccccaaaatcattttgtctgttttgggtcccttgcattgcatatgaatttttatatgatcattgtgtcaattcctgcaaaacagctgggatcttgatagggatttagttgaattggtagataaatttgagaaataactgctattttaatggtgttaggttttctgttccatgactgtgggatgtctttgcatttgcttaggtctttatttcagtgatgttttagagatttcagtgtgcaagtcttgacgtctttaatttttttctaagtattttactgatgccactttaattatatgattattttctaatttttatttttgtattcatcactggtgttagaaataaaattaatttttgtatattgattttgtatattgtagcttttctaaaattctttttttgtcacttagtattttttgcatatgagatcatgcatctgtgaacagaaatacttttacttcttcctttccagtctagattcctattatttcattttcttgccttagtgtgctggctagcacctccagtacaatattggatagaagtgacaagagcagacatctttttcttgttcctgattttaaggggaaagcattcagtctttcaccattgagtatgatgttagctagctgtgggtttgcttcaagttgaggaaattcttttattaaacctagtttactgagtgttttttaatcaaaaaaaaaaaaaggaggggctgtgggttttgttaaatgcttcttctgtatcaagattttcatgttgttttgtcctttattaatatgttgtattaatggacttttgtatattgaattaactttgcattcctgggataatctcagttgtccatgctacataaaccttgttctatgctgctgga

SEQ ID NO: 106 - DNA, 9154 bp, Homo sapiens
  source 1..9154: mol_type = genomic DNA
agtcctcccgtcttgcgccgcggccgcgagatccgtgtgtctcccaagatggtggcgctgggctcggggtgactacaggagacgacggggccttttcccttcgccaggacccgacacaccaggcttcgctcgctcgcgcacccctccgccgcgtagccatccgccagcgcgggcgcccgccatccgccgcctacttacgcttcacctctgccgacccggcgcgctcggctgcgggcggcggcgcctccttcggctcctcctcggaatagctcgcggcctgtagcccctggcaggagggcccctcagccccccggtgtggacaggcagcggcggctggcgacgaacgccgggatttcggcggccccggcgctccctttcccggcctcgttttccggataaggaagcgcgggtcccgcatgagccccggcggtggcggcagcgaaagagaacgaggcggtggcgggcggaggcggcgggcgagggcgactacgaccagtgaggcggccgccgcagcccaggcgcgggggcgacgacagagactgccatactgttttccacagtgactgcaccattttacattcccaccagcagtgaataagggttccaatttctctgcatcttttctaacacttgaggggaggtatggtgtcaagaaaacatagtcaccattattacgaaaagtaaaatatggaagagatgatccctaccatcaatcagcttacaactagaggcactgacaaatgtatacagatagctgtaatgtaaggttaaaaatctgtaagagcctgattttagaattcaccagctcctcagaagtttggcgaaatatgagttattaagcctacgctcagatcaaggtagcagctagactggtgtgacaacctgtttttaatcagtgactcaaagctgtgatcaccctgatgtcaccgaatggccacagcttgtaaaagtgccagcaggtttattttttgttttgcaagccagctctgcctccttacagtatgacatctgatgctggagggtcgcactttcaaaaatgagtcagctggtacatggggttatcatcaatttttagctcttctgtctgggagatacaagtttggaagcaatcttggggtacttacccacaaggctggtggagaccagatcaggagaacctcagtctgacgacattgaagctagccgaatgaagcgagcagctgcaaagcatctaatagaacgctactaccaccagttaactgagggctgtggaaatgaagcctgcacgaatgagttttgtgcttcctgtccaacttttcttcgtatggataataatgcagcagctattaaagccctcgagctttataagattaatgcaaaactctgtgatcctcatccctccaagaaaggagcaagctcagcttaccttgagaactcgaaaggtgcccccaacaactcctgctctgagataaaaatgaacaagaaaggcgctagaattgattttaaagatgtgacttacttaacagaagagaaggtatatgaaattcttgaattatgtagagaaagagaggattattcccctttaatccgtgttattggaagagttttttctagtgctgaggcattggtacagagcttccggaaagttaaacaacacaccaaggaagaactgaaatctcttcaagcaaaagatgaagacaaagatgaagatgaaaaggaaaaagctgcatgttctgctgctgctatggaagaagactcagaagcatcttcctcaaggataggtgatagctcacagggagacaacaatttgcaaaaattaggccctgatgatgtgtctgtggatattgatgccattagaagggtctacaccagattgctctctaatgaaaaaattgaaactgcctttctcaatgcacttgtatatttgtcacctaacgtggaatgtgacttgacgtatcacaatgtatactctcgagatcctaattatctgaatttgttcattatcgtaatggagaatagaaatctccacagtcctgaatatctggaaatggctttgccattattttgcaaagcgatgagcaagctaccccttgcagcccaaggaaaactgatcagactgtggtctaaatacaatgcagaccagattcggagaatgatggagacatttcagcaacttattacttataaagtcataagcaatgaatttaacagtcgaaatctagtgaatgatgatgatgccattgttgctgcttcgaagtgcttgaaaatggtttactatgcaaatgtagtgggaggggaagtggacacaaatcacaatgaagaagatgatgaagagcccatccctgagtccagcgagctgacacttcaggaacttttgggagaagaaagaagaaacaagaaaggtcctcgagtggaccccctggaaactgaacttggtgttaaaaccctggattgtcgaaaaccacttatcccttttgaagagtttattaatgaaccactgaatgaggttctagaaatggataaagattatacttttttcaaagtagaaacagagaacaaattctcttttatgacatgtccctttatattgaatgctgtcacaaagaatttgggattatattatgacaatagaattcgcatgtacagtgaacgaagaatcactgttctctacagcttagttcaaggacagcagttgaatccatatttgagactcaaagttagacgtgaccatatcatagatgatgcacttgtccggctagagatgatcgctatggaaaatcctgcagacttgaagaagcagttgtatgtggaatttgaaggagaacaaggagttgatgagggaggtgtttccaaagaattttttcagctggttgtggaggaaatcttcaatccagatattggtatgttcacatacgatgaatctacaaaattgttttggtttaatccatcttcttttgaaactgagggtcagtttactctgattggcatagtactgggtctggctatttacaataactgtatactggatgtacattttcccatggttgtctacaggaagctaatggggaaaaaaggaacttttcgtgacttgggagactctcacccagttctatatcagagtttaaaagatttattggagtatgaagggaatgtggaagatgacatgatgatcactttccagatatcacagacagatctttttggtaacccaatgatgtatgatctaaaggaaaatggtgataaaattccaattacaaatgaaaacaggaaggaatttgtcaatctttattctgactacattctcaataaatcagtagaaaaacagttcaaggcttttcggagaggttttcatatggtgaccaatgaatctcccttaaagtacttattcagaccagaagaaattgaattgcttatatgtggaagccggaatctagatttccaagcactagaagaaactacagaatatgacggtggctataccagggactctgttctgattagggagttctgggaaatcgttcattcatttacagatgaacagaaaagactcttcttgcagtttacaacgggcacagacagagcacctgtgggaggactaggaaaattaaagatgattatagccaaaaatggcccagacacagaaaggttacctacatctcatacttgctttaatgtgcttttacttccggaatactcaagcaaagaaaaacttaaagagagattgttgaaggccatcacgtatgccaaaggatttggcatgctgtaaaacaaaacaaaacaaaataaaacaaaaaaaaggaaggaaaaaaaaagaaaaaatttaaaaaattttaaaaatataacgagggataaatttttggtggtgatagtgtcccagtacaaaaaggctgtaagatagtcaaccacagtagtcacctatgtctgtgcctcccttctttattggggacatgtgggctggaacagcagatttcagctacatatatgaacaaatcctttattattattataattatttttttgcgtgaaagtgttacatattctttcacttgtatgtacagagaggtttttctgaatatttattttaagggttaaatcacttttgcttgtgtttattactgcttgaggttgagccttttgagtatttaaaaaatatataccaacagaactactctcccaaggaaaatattgccaccatttgtagaccacgtaaccttcaagtatgtgctacttttttgtccctgtatctaactcaaatcaggaactgtattttttttaatgatttgcttttgaaacttgaagtcttgaaaacagtgtgatgcaattactgctgttctagcccccaaagagttttctgtgcaaaatcttgagaatcaatcaataaagaaagatggaaggaagggagaaattggaatgttttaactgcagccctcagaactttagtaacagcacaacaaattaaaaacaaaaacaactcatgccacagtatgtcgtcttcatgtgtcttgcaatgaactgtttcagtagccaatcctctttcttagtatatgaaaggacagggatttttgttcttgttgttctcgttgttgttttaagtttactggggaaagtgcatttggccaaatgaaatggtagtcaagcctattgcaacaaagttaggaagtttgttgtttgtttattataaacaaaaagcatgtgaaagtgcacttaagatagagtttttattaattacttacttattacctagattttaaatagacaatccaaagtctccccttcgtgttgccatcatcttgttgaatcagccattttatcgaggcacgtgatcagtgttgcaacataatgaaaaagatggctactgtgccttgtgttacttaatcatacagtaagctgacctggaaatgaatgaaactattactcctaagaattacattgtatagccccacagattaaatttaattaattaattcaaaacatgttaaacgttactttcatgtactatggaaaagtacaagtaggtttacattactgatttccagaagtaagtagtttcccctttcctagtcttctgtgtatgtgatgttgttaatttcttttattgcattataaaataaaaggattatgtatttttaactaaggtgagacattgatatatccttttgctacaagctatagctaatgtgctgagcttgtgccttggtgattgattgattgattgactgattgttttaactgattactgtagatcaacctgatgatttgtttgtttgaaattggcaggaaaaatgcagctttcaaatcattggggggagaaaaaggatgtctttcaggattattttaattaatttttttcataattgagacagaactgtttgttatgtaccataatgctaaataaaactgtggcacttttcaccataatttaatttagtggaaaaagaagacaatgctttccatattgtgataaggtaacatggggtttttctgggccagcctttagaacactgttagggtacatacgctaccttgatgaaagggaccttcgtgcaactgtagtcatcttaaaggcttctcatccactgtgcttcttaatgtgtaattaaagtgaggagaaattaaatactctgagggcgttttatataataaattcgtgaagaaatgtgtgctcttcagttctcaagttttattattatggtatttattaaagttctacaattgtaataacgtatccatatgacaagttttaaagtggtaattgaaataggttatcagatatagagttgttcacatcaagtagacttttaacagagtcagaatgaacctacccttaaaattttagagaaaaaaaatcgtcggttgcacagaatagctgctctagcttgcttaattatgccgggcatgttgtcactcctcttacttttgctgccttttcattactatttaatggaatgtccctgaacaataaggaagagcaaaacatagacattttgactacagtggatacttcctctaccccaaatgttatgttataaaagtactttttttgcccaggtactctattatatattttggttttctttgaattagacctcaatctccaggaagctctggagggaaaaaaaggaaccataaactaaagtaactggttttccaaataaatgtaaacttttttaaccttttattattatagaacatttcaaacatacataaaacatgaaaacagcctgcagccaaacttttctggaccttggcagctccagcaaatgagctggtcatcctaaccctggtttcctgagacaactacttttggggatgcttgcttgtatagggagatgatagatagatagatacatatcaaaaagaaacttgaaaaaggcttcgaacagaacttgccgatgttactcatccctcctcggtacagacattctgttagaacagatggttgtaatggggcagcatcactccctattcccattaaaaacatgaccattctgagatttcaggccccttcgaggaatttttctcaagaattccatacaaactgtcagaggaagaaatgtcgtcccaagactagtccctgtgtagtcttgatccctttacctgcttactgtaattttttttctctgactttccgccagtgtctaagggccatctgtacccctcccacccttccatgagccactgtataatccaaaaacacaccttccatttgctccctcacttgtctccttttacctcaacagtgttagtgtgtaaagaattgcctggggagggtagagggttttacaagtacagagtcccaagtcttttctcccctccccgttagtgggttggcatttattaataggcactgcaagattttgatgcaggtgtggggtagatatcactgtgaaaggctactaatgcatggtagtttcaccgaaagtacagtcttcaaggatccttataatctcctcattgccaaaatcagtaacatctataaccttgacaacaccctagcttgggctgttgcttctctggctacttgtttttccatcccagtttacccagattttagatggatactcctccaattctgcttaaagtccttacctgttcttgcccagttccctctagtcaacctcagtcactcccaaagattcttccccaatcccatatcttttgctcagacctctgtctctgggatttctttgttacctcatagtcagtagtcctaaaaacaaaattcttcatcttgcatctctatcgaccgaccattctttgtttctttttaagaaatgtaaccttcaccccaatcatcaaaatctctcattcctcaattgtcacaggttgtcacttctttccccctaaacctctcccatcattccttccttctttatactgcccttacaggtcctgatcctctgactcacccggacattcttagcagctgcctaatttcactccctgactctcatctccctcttccaatccttttcattgtgctagaacactatcttgctaattttaatatcctctgcattcagtgcctccacagattgccccctcactgacctttccaatttggccttgtgttacacactttcctcgctgcattcctacccagcatcttcacttgtcatatttctcaaatactcttcatgaccagatatttaaagtacctcatccatgaagacttcatcaacccccaaagtgcctccaatgcttccgtggtagcacagcataatggggtacatttcttagttgaacagtgaggagtcactgggattcttacagagtgtcttagggtctcctcttgatactctttccacatttcagttaaggaattttcttacatctttttttcttctaataacctttgcctggagtgtaagtaaattcatgatagagactgtcatttttaaaaaaaaaaacaaaccattttgcctttcacatgttattacctccatctttctgttatcttgtcagtgttgccacctaaatgattgaaaatgaccgagcatgcagtagaatgtagtgaagtttcctatttcatccattttttgcataagtgcattggtatctgtatatccatctgcccaagcaccagttgttgaaaagactattatttccccatgaatggtcctggtacccttgtcaaagaacagttgaccataaatataagactttctggattctcagtcttactccattgccctatatgtctgtcgttataccagcaccgcactgtcttgatggctgtagcttggtagtaagtttagatttgggatgtgcaagtcctccattttttttttttttttccccaaaatcattttgtctgttttgggtcccttgcattgcatatgaatttttatatgatcattgtgtcaattcctgcaaaacagctgggatcttgatagggatttagttgaattggtagataaatttgagaaataactgctattttaatggtgttaggttttctgttccatgactgtgggatgtctttgcatttgcttaggtctttatttcagtgatgttttagagatttcagtgtgcaagtcttgacgtctttaatttttttctaagtattttactgatgccactttaattatatgattattttctaatttttatttttgtattcatcactggtgttagaaataaaattaatttttgtatattgattttgtatattgtagcttttctaaaattctttttttgtcacttagtattttttgcatatgagatcatgcatctgtgaacagaaatacttttacttcttcctttccagtctagattcctattatttcattttcttgccttagtgtgctggctagcacctccagtacaatattggatagaagtgacaagagcagacatctttttcttgttcctgattttaaggggaaagcattcagtctttcaccattgagtatgatgttagctagctgtgggtttgcttcaagttgaggaaattcttttattaaacctagtttactgagtgttttttaatcaaaaaaaaaaaaaggaggggctgtgggttttgttaaatgcttcttctgtatcaagattttcatgttgttttgtcctttattaatatgttgtattaatggacttttgtatattgaattaactttgcattcctgggataatctcagttgtccatgctacataaaccttgttctatgctgctgga

SEQ ID NO: 107 - DNA, 8989 bp, Homo sapiens
  source 1..8989: mol_type = genomic DNA
agtcctcccgtcttgcgccgcggccgcgagatccgtgtgtctcccaagatggtggcgctgggctcggggtgactacaggagacgacggggccttttcccttcgccaggacccgacacaccaggcttcgctcgctcgcgcacccctccgccgcgtagccatccgccagcgcgggcgcccgccatccgccgcctacttacgcttcacctctgccgacccggcgcgctcggctgcgggcggcggcgcctccttcggctcctcctcggaatagctcgcggcctgtagcccctggcaggagggcccctcagccccccggtgtggacaggcagcggcggctggcgacgaacgccgggatttcggcggccccggcgctccctttcccggcctcgttttccggataaggaagcgcgggtcccgcatgagccccggcggtggcggcagcgaaagagaacgaggcggtggcgggcggaggcggcgggcgagggcgactacgaccagtgaggcggccgccgcagcccaggcgcgggggcgacgacaggttaaaaatctgtaagagcctgattttagaattcaccagctcctcagaagtttggcgaaatatgagttattaagcctacgctcagatcaaggtagcagctagactggtgtgacaacctgtttttaatcagtgactcaaagctgtgatcaccctgatgtcaccgaatggccacagcttgtaaaagagagttacagtggaggtaaaaggagtggcttgcaggatggagaagctgcaccagtgttattggaatgccagcaggtttattttttgttttgcaagccagctctgcctccttacagtatgacatctgatgctggagggtcgcactttcaaaaatgagtcagctggtacatggggttatcatcaatttttagctcttctgtctgggagatacaagtttggaagcaatcttggggtacttacccacaaggctggtggagaccagatcaggagaacctcagtctgacgacattgaagctagccgaatgaagcgagcagctgcaaagcatctaatagaacgctactaccaccagttaactgagggctgtggaaatgaagcctgcacgaatgagttttgtgcttcctgtccaacttttcttcgtatggataataatgcagcagctattaaagccctcgagctttataagattaatgcaaaactctgtgatcctcatccctccaagaaaggagcaagctcagcttaccttgagaactcgaaaggtgcccccaacaactcctgctctgagataaaaatgaacaagaaaggcgctagaattgattttaaagatgtgacttacttaacagaagagaaggtatatgaaattcttgaattatgtagagaaagagaggattattcccctttaatccgtgttattggaagagttttttctagtgctgaggcattggtacagagcttccggaaagttaaacaacacaccaaggaagaactgaaatctcttcaagcaaaagatgaagacaaagatgaagatgaaaaggaaaaagctgcatgttctgctgctgctatggaagaagactcagaagcatcttcctcaaggataggtgatagctcacagggagacaacaatttgcaaaaattaggccctgatgatgtgtctgtggatattgatgccattagaagggtctacaccagattgctctctaatgaaaaaattgaaactgcctttctcaatgcacttgtatatttgtcacctaacgtggaatgtgacttgacgtatcacaatgtatactctcgagatcctaattatctgaatttgttcattatcgtaatggagaatagaaatctccacagtcctgaatatctggaaatggctttgccattattttgcaaagcgatgagcaagctaccccttgcagcccaaggaaaactgatcagactgtggtctaaatacaatgcagaccagattcggagaatgatggagacatttcagcaacttattacttataaagtcataagcaatgaatttaacagtcgaaatctagtgaatgatgatgatgccattgttgctgcttcgaagtgcttgaaaatggtttactatgcaaatgtagtgggaggggaagtggacacaaatcacaatgaagaagatgatgaagagcccatccctgagtccagcgagctgacacttcaggaacttttgggagaagaaagaagaaacaagaaaggtcctcgagtggaccccctggaaactgaacttggtgttaaaaccctggattgtcgaaaaccacttatcccttttgaagagtttattaatgaaccactgaatgaggttctagaaatggataaagattatacttttttcaaagtagaaacagagaacaaattctcttttatgacatgtccctttatattgaatgctgtcacaaagaatttgggattatattatgacaatagaattcgcatgtacagtgaacgaagaatcactgttctctacagcttagttcaaggacagcagttgaatccatatttgagactcaaagttagacgtgaccatatcatagatgatgcacttgtccggctagagatgatcgctatggaaaatcctgcagacttgaagaagcagttgtatgtggaatttgaaggagaacaaggagttgatgagggaggtgtttccaaagaattttttcagctggttgtggaggaaatcttcaatccagatattggtatgttcacatacgatgaatctacaaaattgttttggtttaatccatcttcttttgaaactgagggtcagtttactctgattggcatagtactgggtctggctatttacaataactgtatactggatgtacattttcccatggttgtctacaggaagctaatggggaaaaaaggaacttttcgtgacttgggagactctcacccagttctatatcagagtttaaaagatttattggagtatgaagggaatgtggaagatgacatgatgatcactttccagatatcacagacagatctttttggtaacccaatgatgtatgatctaaaggaaaatggtgataaaattccaattacaaatgaaaacaggaaggaatttgtcaatctttattctgactacattctcaataaatcagtagaaaaacagttcaaggcttttcggagaggttttcatatggtgaccaatgaatctcccttaaagtacttattcagaccagaagaaattgaattgcttatatgtggaagccggaatctagatttccaagcactagaagaaactacagaatatgacggtggctataccagggactctgttctgattagggagttctgggaaatcgttcattcatttacagatgaacagaaaagactcttcttgcagtttacaacgggcacagacagagcacctgtgggaggactaggaaaattaaagatgattatagccaaaaatggcccagacacagaaaggttacctacatctcatacttgctttaatgtgcttttacttccggaatactcaagcaaagaaaaacttaaagagagattgttgaaggccatcacgtatgccaaaggatttggcatgctgtaaaacaaaacaaaacaaaataaaacaaaaaaaaggaaggaaaaaaaaagaaaaaatttaaaaaattttaaaaatataacgagggataaatttttggtggtgatagtgtcccagtacaaaaaggctgtaagatagtcaaccacagtagtcacctatgtctgtgcctcccttctttattggggacatgtgggctggaacagcagatttcagctacatatatgaacaaatcctttattattattataattatttttttgcgtgaaagtgttacatattctttcacttgtatgtacagagaggtttttctgaatatttattttaagggttaaatcacttttgcttgtgtttattactgcttgaggttgagccttttgagtatttaaaaaatatataccaacagaactactctcccaaggaaaatattgccaccatttgtagaccacgtaaccttcaagtatgtgctacttttttgtccctgtatctaactcaaatcaggaactgtattttttttaatgatttgcttttgaaacttgaagtcttgaaaacagtgtgatgcaattactgctgttctagcccccaaagagttttctgtgcaaaatcttgagaatcaatcaataaagaaagatggaaggaagggagaaattggaatgttttaactgcagccctcagaactttagtaacagcacaacaaattaaaaacaaaaacaactcatgccacagtatgtcgtcttcatgtgtcttgcaatgaactgtttcagtagccaatcctctttcttagtatatgaaaggacagggatttttgttcttgttgttctcgttgttgttttaagtttactggggaaagtgcatttggccaaatgaaatggtagtcaagcctattgcaacaaagttaggaagtttgttgtttgtttattataaacaaaaagcatgtgaaagtgcacttaagatagagtttttattaattacttacttattacctagattttaaatagacaatccaaagtctccccttcgtgttgccatcatcttgttgaatcagccattttatcgaggcacgtgatcagtgttgcaacataatgaaaaagatggctactgtgccttgtgttacttaatcatacagtaagctgacctggaaatgaatgaaactattactcctaagaattacattgtatagccccacagattaaatttaattaattaattcaaaacatgttaaacgttactttcatgtactatggaaaagtacaagtaggtttacattactgatttccagaagtaagtagtttcccctttcctagtcttctgtgtatgtgatgttgttaatttcttttattgcattataaaataaaaggattatgtatttttaactaaggtgagacattgatatatccttttgctacaagctatagctaatgtgctgagcttgtgccttggtgattgattgattgattgactgattgttttaactgattactgtagatcaacctgatgatttgtttgtttgaaattggcaggaaaaatgcagctttcaaatcattggggggagaaaaaggatgtctttcaggattattttaattaatttttttcataattgagacagaactgtttgttatgtaccataatgctaaataaaactgtggcacttttcaccataatttaatttagtggaaaaagaagacaatgctttccatattgtgataaggtaacatggggtttttctgggccagcctttagaacactgttagggtacatacgctaccttgatgaaagggaccttcgtgcaactgtagtcatcttaaaggcttctcatccactgtgcttcttaatgtgtaattaaagtgaggagaaattaaatactctgagggcgttttatataataaattcgtgaagaaatgtgtgctcttcagttctcaagttttattattatggtatttattaaagttctacaattgtaataacgtatccatatgacaagttttaaagtggtaattgaaataggttatcagatatagagttgttcacatcaagtagacttttaacagagtcagaatgaacctacccttaaaattttagagaaaaaaaatcgtcggttgcacagaatagctgctctagcttgcttaattatgccgggcatgttgtcactcctcttacttttgctgccttttcattactatttaatggaatgtccctgaacaataaggaagagcaaaacatagacattttgactacagtggatacttcctctaccccaaatgttatgttataaaagtactttttttgcccaggtactctattatatattttggttttctttgaattagacctcaatctccaggaagctctggagggaaaaaaaggaaccataaactaaagtaactggttttccaaataaatgtaaacttttttaaccttttattattatagaacatttcaaacatacataaaacatgaaaacagcctgcagccaaacttttctggaccttggcagctccagcaaatgagctggtcatcctaaccctggtttcctgagacaactacttttggggatgcttgcttgtatagggagatgatagatagatagatacatatcaaaaagaaacttgaaaaaggcttcgaacagaacttgccgatgttactcatccctcctcggtacagacattctgttagaacagatggttgtaatggggcagcatcactccctattcccattaaaaacatgaccattctgagatttcaggccccttcgaggaatttttctcaagaattccatacaaactgtcagaggaagaaatgtcgtcccaagactagtccctgtgtagtcttgatccctttacctgcttactgtaattttttttctctgactttccgccagtgtctaagggccatctgtacccctcccacccttccatgagccactgtataatccaaaaacacaccttccatttgctccctcacttgtctccttttacctcaacagtgttagtgtgtaaagaattgcctggggagggtagagggttttacaagtacagagtcccaagtcttttctcccctccccgttagtgggttggcatttattaataggcactgcaagattttgatgcaggtgtggggtagatatcactgtgaaaggctactaatgcatggtagtttcaccgaaagtacagtcttcaaggatccttataatctcctcattgccaaaatcagtaacatctataaccttgacaacaccctagcttgggctgttgcttctctggctacttgtttttccatcccagtttacccagattttagatggatactcctccaattctgcttaaagtccttacctgttcttgcccagttccctctagtcaacctcagtcactcccaaagattcttccccaatcccatatcttttgctcagacctctgtctctgggatttctttgttacctcatagtcagtagtcctaaaaacaaaattcttcatcttgcatctctatcgaccgaccattctttgtttctttttaagaaatgtaaccttcaccccaatcatcaaaatctctcattcctcaattgtcacaggttgtcacttctttccccctaaacctctcccatcattccttccttctttatactgcccttacaggtcctgatcctctgactcacccggacattcttagcagctgcctaatttcactccctgactctcatctccctcttccaatccttttcattgtgctagaacactatcttgctaattttaatatcctctgcattcagtgcctccacagattgccccctcactgacctttccaatttggccttgtgttacacactttcctcgctgcattcctacccagcatcttcacttgtcatatttctcaaatactcttcatgaccagatatttaaagtacctcatccatgaagacttcatcaacccccaaagtgcctccaatgcttccgtggtagcacagcataatggggtacatttcttagttgaacagtgaggagtcactgggattcttacagagtgtcttagggtctcctcttgatactctttccacatttcagttaaggaattttcttacatctttttttcttctaataacctttgcctggagtgtaagtaaattcatgatagagactgtcatttttaaaaaaaaaaacaaaccattttgcctttcacatgttattacctccatctttctgttatcttgtcagtgttgccacctaaatgattgaaaatgaccgagcatgcagtagaatgtagtgaagtttcctatttcatccattttttgcataagtgcattggtatctgtatatccatctgcccaagcaccagttgttgaaaagactattatttccccatgaatggtcctggtacccttgtcaaagaacagttgaccataaatataagactttctggattctcagtcttactccattgccctatatgtctgtcgttataccagcaccgcactgtcttgatggctgtagcttggtagtaagtttagatttgggatgtgcaagtcctccattttttttttttttttccccaaaatcattttgtctgttttgggtcccttgcattgcatatgaatttttatatgatcattgtgtcaattcctgcaaaacagctgggatcttgatagggatttagttgaattggtagataaatttgagaaataactgctattttaatggtgttaggttttctgttccatgactgtgggatgtctttgcatttgcttaggtctttatttcagtgatgttttagagatttcagtgtgcaagtcttgacgtctttaatttttttctaagtattttactgatgccactttaattatatgattattttctaatttttatttttgtattcatcactggtgttagaaataaaattaatttttgtatattgattttgtatattgtagcttttctaaaattctttttttgtcacttagtattttttgcatatgagatcatgcatctgtgaacagaaatacttttacttcttcctttccagtctagattcctattatttcattttcttgccttagtgtgctggctagcacctccagtacaatattggatagaagtgacaagagcagacatctttttcttgttcctgattttaaggggaaagcattcagtctttcaccattgagtatgatgttagctagctgtgggtttgcttcaagttgaggaaattcttttattaaacctagtttactgagtgttttttaatcaaaaaaaaaaaaaggaggggctgtgggttttgttaaatgcttcttctgtatcaagattttcatgttgttttgtcctttattaatatgttgtattaatggacttttgtatattgaattaactttgcattcctgggataatctcagttgtccatgctacataaaccttgttctatgctgctgga

SEQ ID NO: 108 - DNA, 8608 bp, Homo sapiens
  source 1..8608: mol_type = genomic DNA
agtcctcccgtcttgcgccgcggccgcgagatccgtgtgtctcccaagatggtggcgctgggctcggggtgactacaggagacgacggggccttttcccttcgccaggacccgacacaccaggcttcgctcgctcgcgcacccctccgccgcgtagccatccgccagcgcgggcgcccgccatccgccgcctacttacgcttcacctctgccgacccggcgcgctcggctgcgggcggcggcgcctccttcggctcctcctcggaatagctcgcggcctgtagcccctggcaggagggcccctcagccccccggtgtggacaggcagcggcggctggcgacgaacgccgggatttcggcggccccggcgctccctttcccggcctcgttttccggataaggaagcgcgggtcccgcatgagccccggcggtggcggcagcgaaagagaacgaggcggtggcgggcggaggcggcgggcgagggcgactacgaccagtgaggcggccgccgcagcccaggcgcgggggcgacgacaggttaaaaatctgtaagagcctgattttagaattcaccagctcctcagaagtttggcgaaatatgatcaggagaacctcagtctgacgacattgaagctagccgaatgaagcgagcagctgcaaagcatctaatagaacgctactaccaccagttaactgagggctgtggaaatgaagcctgcacgaatgagttttgtgcttcctgtccaacttttcttcgtatggataataatgcagcagctattaaagccctcgagctttataagattaatgcaaaactctgtgatcctcatccctccaagaaaggagcaagctcagcttaccttgagaactcgaaaggtgcccccaacaactcctgctctgagataaaaatgaacaagaaaggcgctagaattgattttaaagatgtgacttacttaacagaagagaaggtatatgaaattcttgaattatgtagagaaagagaggattattcccctttaatccgtgttattggaagagttttttctagtgctgaggcattggtacagagcttccggaaagttaaacaacacaccaaggaagaactgaaatctcttcaagcaaaagatgaagacaaagatgaagatgaaaaggaaaaagctgcatgttctgctgctgctatggaagaagactcagaagcatcttcctcaaggataggtgatagctcacagggagacaacaatttgcaaaaattaggccctgatgatgtgtctgtggatattgatgccattagaagggtctacaccagattgctctctaatgaaaaaattgaaactgcctttctcaatgcacttgtatatttgtcacctaacgtggaatgtgacttgacgtatcacaatgtatactctcgagatcctaattatctgaatttgttcattatcgtaatggagaatagaaatctccacagtcctgaatatctggaaatggctttgccattattttgcaaagcgatgagcaagctaccccttgcagcccaaggaaaactgatcagactgtggtctaaatacaatgcagaccagattcggagaatgatggagacatttcagcaacttattacttataaagtcataagcaatgaatttaacagtcgaaatctagtgaatgatgatgatgccattgttgctgcttcgaagtgcttgaaaatggtttactatgcaaatgtagtgggaggggaagtggacacaaatcacaatgaagaagatgatgaagagcccatccctgagtccagcgagctgacacttcaggaacttttgggagaagaaagaagaaacaagaaaggtcctcgagtggaccccctggaaactgaacttggtgttaaaaccctggattgtcgaaaaccacttatcccttttgaagagtttattaatgaaccactgaatgaggttctagaaatggataaagattatacttttttcaaagtagaaacagagaacaaattctcttttatgacatgtccctttatattgaatgctgtcacaaagaatttgggattatattatgacaatagaattcgcatgtacagtgaacgaagaatcactgttctctacagcttagttcaaggacagcagttgaatccatatttgagactcaaagttagacgtgaccatatcatagatgatgcacttgtccggctagagatgatcgctatggaaaatcctgcagacttgaagaagcagttgtatgtggaatttgaaggagaacaaggagttgatgagggaggtgtttccaaagaattttttcagctggttgtggaggaaatcttcaatccagatattggtatgttcacatacgatgaatctacaaaattgttttggtttaatccatcttcttttgaaactgagggtcagtttactctgattggcatagtactgggtctggctatttacaataactgtatactggatgtacattttcccatggttgtctacaggaagctaatggggaaaaaaggaacttttcgtgacttgggagactctcacccagttctatatcagagtttaaaagatttattggagtatgaagggaatgtggaagatgacatgatgatcactttccagatatcacagacagatctttttggtaacccaatgatgtatgatctaaaggaaaatggtgataaaattccaattacaaatgaaaacaggaaggaatttgtcaatctttattctgactacattctcaataaatcagtagaaaaacagttcaaggcttttcggagaggttttcatatggtgaccaatgaatctcccttaaagtacttattcagaccagaagaaattgaattgcttatatgtggaagccggaatctagatttccaagcactagaagaaactacagaatatgacggtggctataccagggactctgttctgattagggagttctgggaaatcgttcattcatttacagatgaacagaaaagactcttcttgcagtttacaacgggcacagacagagcacctgtgggaggactaggaaaattaaagatgattatagccaaaaatggcccagacacagaaaggttacctacatctcatacttgctttaatgtgcttttacttccggaatactcaagcaaagaaaaacttaaagagagattgttgaaggccatcacgtatgccaaaggatttggcatgctgtaaaacaaaacaaaacaaaataaaacaaaaaaaaggaaggaaaaaaaaagaaaaaatttaaaaaattttaaaaatataacgagggataaatttttggtggtgatagtgtcccagtacaaaaaggctgtaagatagtcaaccacagtagtcacctatgtctgtgcctcccttctttattggggacatgtgggctggaacagcagatttcagctacatatatgaacaaatcctttattattattataattatttttttgcgtgaaagtgttacatattctttcacttgtatgtacagagaggtttttctgaatatttattttaagggttaaatcacttttgcttgtgtttattactgcttgaggttgagccttttgagtatttaaaaaatatataccaacagaactactctcccaaggaaaatattgccaccatttgtagaccacgtaaccttcaagtatgtgctacttttttgtccctgtatctaactcaaatcaggaactgtattttttttaatgatttgcttttgaaacttgaagtcttgaaaacagtgtgatgcaattactgctgttctagcccccaaagagttttctgtgcaaaatcttgagaatcaatcaataaagaaagatggaaggaagggagaaattggaatgttttaactgcagccctcagaactttagtaacagcacaacaaattaaaaacaaaaacaactcatgccacagtatgtcgtcttcatgtgtcttgcaatgaactgtttcagtagccaatcctctttcttagtatatgaaaggacagggatttttgttcttgttgttctcgttgttgttttaagtttactggggaaagtgcatttggccaaatgaaatggtagtcaagcctattgcaacaaagttaggaagtttgttgtttgtttattataaacaaaaagcatgtgaaagtgcacttaagatagagtttttattaattacttacttattacctagattttaaatagacaatccaaagtctccccttcgtgttgccatcatcttgttgaatcagccattttatcgaggcacgtgatcagtgttgcaacataatgaaaaagatggctactgtgccttgtgttacttaatcatacagtaagctgacctggaaatgaatgaaactattactcctaagaattacattgtatagccccacagattaaatttaattaattaattcaaaacatgttaaacgttactttcatgtactatggaaaagtacaagtaggtttacattactgatttccagaagtaagtagtttcccctttcctagtcttctgtgtatgtgatgttgttaatttcttttattgcattataaaataaaaggattatgtatttttaactaaggtgagacattgatatatccttttgctacaagctatagctaatgtgctgagcttgtgccttggtgattgattgattgattgactgattgttttaactgattactgtagatcaacctgatgatttgtttgtttgaaattggcaggaaaaatgcagctttcaaatcattggggggagaaaaaggatgtctttcaggattattttaattaatttttttcataattgagacagaactgtttgttatgtaccataatgctaaataaaactgtggcacttttcaccataatttaatttagtggaaaaagaagacaatgctttccatattgtgataaggtaacatggggtttttctgggccagcctttagaacactgttagggtacatacgctaccttgatgaaagggaccttcgtgcaactgtagtcatcttaaaggcttctcatccactgtgcttcttaatgtgtaattaaagtgaggagaaattaaatactctgagggcgttttatataataaattcgtgaagaaatgtgtgctcttcagttctcaagttttattattatggtatttattaaagttctacaattgtaataacgtatccatatgacaagttttaaagtggtaattgaaataggttatcagatatagagttgttcacatcaagtagacttttaacagagtcagaatgaacctacccttaaaattttagagaaaaaaaatcgtcggttgcacagaatagctgctctagcttgcttaattatgccgggcatgttgtcactcctcttacttttgctgccttttcattactatttaatggaatgtccctgaacaataaggaagagcaaaacatagacattttgactacagtggatacttcctctaccccaaatgttatgttataaaagtactttttttgcccaggtactctattatatattttggttttctttgaattagacctcaatctccaggaagctctggagggaaaaaaaggaaccataaactaaagtaactggttttccaaataaatgtaaacttttttaaccttttattattatagaacatttcaaacatacataaaacatgaaaacagcctgcagccaaacttttctggaccttggcagctccagcaaatgagctggtcatcctaaccctggtttcctgagacaactacttttggggatgcttgcttgtatagggagatgatagatagatagatacatatcaaaaagaaacttgaaaaaggcttcgaacagaacttgccgatgttactcatccctcctcggtacagacattctgttagaacagatggttgtaatggggcagcatcactccctattcccattaaaaacatgaccattctgagatttcaggccccttcgaggaatttttctcaagaattccatacaaactgtcagaggaagaaatgtcgtcccaagactagtccctgtgtagtcttgatccctttacctgcttactgtaattttttttctctgactttccgccagtgtctaagggccatctgtacccctcccacccttccatgagccactgtataatccaaaaacacaccttccatttgctccctcacttgtctccttttacctcaacagtgttagtgtgtaaagaattgcctggggagggtagagggttttacaagtacagagtcccaagtcttttctcccctccccgttagtgggttggcatttattaataggcactgcaagattttgatgcaggtgtggggtagatatcactgtgaaaggctactaatgcatggtagtttcaccgaaagtacagtcttcaaggatccttataatctcctcattgccaaaatcagtaacatctataaccttgacaacaccctagcttgggctgttgcttctctggctacttgtttttccatcccagtttacccagattttagatggatactcctccaattctgcttaaagtccttacctgttcttgcccagttccctctagtcaacctcagtcactcccaaagattcttccccaatcccatatcttttgctcagacctctgtctctgggatttctttgttacctcatagtcagtagtcctaaaaacaaaattcttcatcttgcatctctatcgaccgaccattctttgtttctttttaagaaatgtaaccttcaccccaatcatcaaaatctctcattcctcaattgtcacaggttgtcacttctttccccctaaacctctcccatcattccttccttctttatactgcccttacaggtcctgatcctctgactcacccggacattcttagcagctgcctaatttcactccctgactctcatctccctcttccaatccttttcattgtgctagaacactatcttgctaattttaatatcctctgcattcagtgcctccacagattgccccctcactgacctttccaatttggccttgtgttacacactttcctcgctgcattcctacccagcatcttcacttgtcatatttctcaaatactcttcatgaccagatatttaaagtacctcatccatgaagacttcatcaacccccaaagtgcctccaatgcttccgtggtagcacagcataatggggtacatttcttagttgaacagtgaggagtcactgggattcttacagagtgtcttagggtctcctcttgatactctttccacatttcagttaaggaattttcttacatctttttttcttctaataacctttgcctggagtgtaagtaaattcatgatagagactgtcatttttaaaaaaaaaaacaaaccattttgcctttcacatgttattacctccatctttctgttatcttgtcagtgttgccacctaaatgattgaaaatgaccgagcatgcagtagaatgtagtgaagtttcctatttcatccattttttgcataagtgcattggtatctgtatatccatctgcccaagcaccagttgttgaaaagactattatttccccatgaatggtcctggtacccttgtcaaagaacagttgaccataaatataagactttctggattctcagtcttactccattgccctatatgtctgtcgttataccagcaccgcactgtcttgatggctgtagcttggtagtaagtttagatttgggatgtgcaagtcctccattttttttttttttttccccaaaatcattttgtctgttttgggtcccttgcattgcatatgaatttttatatgatcattgtgtcaattcctgcaaaacagctgggatcttgatagggatttagttgaattggtagataaatttgagaaataactgctattttaatggtgttaggttttctgttccatgactgtgggatgtctttgcatttgcttaggtctttatttcagtgatgttttagagatttcagtgtgcaagtcttgacgtctttaatttttttctaagtattttactgatgccactttaattatatgattattttctaatttttatttttgtattcatcactggtgttagaaataaaattaatttttgtatattgattttgtatattgtagcttttctaaaattctttttttgtcacttagtattttttgcatatgagatcatgcatctgtgaacagaaatacttttacttcttcctttccagtctagattcctattatttcattttcttgccttagtgtgctggctagcacctccagtacaatattggatagaagtgacaagagcagacatctttttcttgttcctgattttaaggggaaagcattcagtctttcaccattgagtatgatgttagctagctgtgggtttgcttcaagttgaggaaattcttttattaaacctagtttactgagtgttttttaatcaaaaaaaaaaaaaggaggggctgtgggttttgttaaatgcttcttctgtatcaagattttcatgttgttttgtcctttattaatatgttgtattaatggacttttgtatattgaattaactttgcattcctgggataatctcagttgtccatgctacataaaccttgttctatgctgctgga

SEQ ID NO: 109 - DNA, 9169 bp, Homo sapiens
  source 1..9169: mol_type = genomic DNA
agtcctcccgtcttgcgccgcggccgcgagatccgtgtgtctcccaagatggtggcgctgggctcggggtgactacaggagacgacggggccttttcccttcgccaggacccgacacaccaggcttcgctcgctcgcgcacccctccgccgcgtagccatccgccagcgcgggcgcccgccatccgccgcctacttacgcttcacctctgccgacccggcgcgctcggctgcgggcggcggcgcctccttcggctcctcctcggaatagctcgcggcctgtagcccctggcaggagggcccctcagccccccggtgtggacaggcagcggcggctggcgacgaacgccgggatttcggcggccccggcgctccctttcccggcctcgttttccggataaggaagcgcgggtcccgcatgagccccggcggtggcggcagcgaaagagaacgaggcggtggcgggcggaggcggcgggcgagggcgactacgaccagtgaggcggccgccgcagcccaggcgcgggggcgacgacagagactgccatactgttttccacagtgactgcaccattttacattcccaccagcagtgaataagggttccaatttctctgcatcttttctaacacttgaggggaggtatggtgtcaagaaaacatagtcaccattattacgaaaagtaaaatatggaagagatgatccctaccatcaatcagcttacaactagaggcactgacaaatgtatacagatagctgtaatgtaaggttaaaaatctgtaagagcctgattttagaattcaccagctcctcagaagtttggcgaaatatgagttattaagcctacgctcagatcaaggtagcagctagactggtgtgacaacctgtttttaatcagtgactcaaagctgtgatcaccctgatgtcaccgaatggccacagcttgtaaaagagagttacagtggaggtaaaaggagtggcttgcaggatggagaagctgcaccagtgttattggaatatgacatctgatgctggagggtcgcactttcaaaaatgagtcagctggtacatggggttatcatcaatttttagctcttctgtctgggagatacaagtttggaagcaatcttggggtacttacccacaaggctggtggagaccagatcaggagaacctcagtctgacgacattgaagctagccgaatgaagcgagcagctgcaaagcatctaatagaacgctactaccaccagttaactgagggctgtggaaatgaagcctgcacgaatgagttttgtgcttcctgtccaacttttcttcgtatggataataatgcagcagctattaaagccctcgagctttataagattaatgcaaaactctgtgatcctcatccctccaagaaaggagcaagctcagcttaccttgagaactcgaaaggtgcccccaacaactcctgctctgagataaaaatgaacaagaaaggcgctagaattgattttaaagatgtgacttacttaacagaagagaaggtatatgaaattcttgaattatgtagagaaagagaggattattcccctttaatccgtgttattggaagagttttttctagtgctgaggcattggtacagagcttccggaaagttaaacaacacaccaaggaagaactgaaatctcttcaagcaaaagatgaagacaaagatgaagatgaaaaggaaaaagctgcatgttctgctgctgctatggaagaagactcagaagcatcttcctcaaggataggtgatagctcacagggagacaacaatttgcaaaaattaggccctgatgatgtgtctgtggatattgatgccattagaagggtctacaccagattgctctctaatgaaaaaattgaaactgcctttctcaatgcacttgtatatttgtcacctaacgtggaatgtgacttgacgtatcacaatgtatactctcgagatcctaattatctgaatttgttcattatcgtaatggagaatagaaatctccacagtcctgaatatctggaaatggctttgccattattttgcaaagcgatgagcaagctaccccttgcagcccaaggaaaactgatcagactgtggtctaaatacaatgcagaccagattcggagaatgatggagacatttcagcaacttattacttataaagtcataagcaatgaatttaacagtcgaaatctagtgaatgatgatgatgccattgttgctgcttcgaagtgcttgaaaatggtttactatgcaaatgtagtgggaggggaagtggacacaaatcacaatgaagaagatgatgaagagcccatccctgagtccagcgagctgacacttcaggaacttttgggagaagaaagaagaaacaagaaaggtcctcgagtggaccccctggaaactgaacttggtgttaaaaccctggattgtcgaaaaccacttatcccttttgaagagtttattaatgaaccactgaatgaggttctagaaatggataaagattatacttttttcaaagtagaaacagagaacaaattctcttttatgacatgtccctttatattgaatgctgtcacaaagaatttgggattatattatgacaatagaattcgcatgtacagtgaacgaagaatcactgttctctacagcttagttcaaggacagcagttgaatccatatttgagactcaaagttagacgtgaccatatcatagatgatgcacttgtccggctagagatgatcgctatggaaaatcctgcagacttgaagaagcagttgtatgtggaatttgaaggagaacaaggagttgatgagggaggtgtttccaaagaattttttcagctggttgtggaggaaatcttcaatccagatattggtatgttcacatacgatgaatctacaaaattgttttggtttaatccatcttcttttgaaactgagggtcagtttactctgattggcatagtactgggtctggctatttacaataactgtatactggatgtacattttcccatggttgtctacaggaagctaatggggaaaaaaggaacttttcgtgacttgggagactctcacccagttctatatcagagtttaaaagatttattggagtatgaagggaatgtggaagatgacatgatgatcactttccagatatcacagacagatctttttggtaacccaatgatgtatgatctaaaggaaaatggtgataaaattccaattacaaatgaaaacaggaaggaatttgtcaatctttattctgactacattctcaataaatcagtagaaaaacagttcaaggcttttcggagaggttttcatatggtgaccaatgaatctcccttaaagtacttattcagaccagaagaaattgaattgcttatatgtggaagccggaatctagatttccaagcactagaagaaactacagaatatgacggtggctataccagggactctgttctgattagggagttctgggaaatcgttcattcatttacagatgaacagaaaagactcttcttgcagtttacaacgggcacagacagagcacctgtgggaggactaggaaaattaaagatgattatagccaaaaatggcccagacacagaaaggttacctacatctcatacttgctttaatgtgcttttacttccggaatactcaagcaaagaaaaacttaaagagagattgttgaaggccatcacgtatgccaaaggatttggcatgctgtaaaacaaaacaaaacaaaataaaacaaaaaaaaggaaggaaaaaaaaagaaaaaatttaaaaaattttaaaaatataacgagggataaatttttggtggtgatagtgtcccagtacaaaaaggctgtaagatagtcaaccacagtagtcacctatgtctgtgcctcccttctttattggggacatgtgggctggaacagcagatttcagctacatatatgaacaaatcctttattattattataattatttttttgcgtgaaagtgttacatattctttcacttgtatgtacagagaggtttttctgaatatttattttaagggttaaatcacttttgcttgtgtttattactgcttgaggttgagccttttgagtatttaaaaaatatataccaacagaactactctcccaaggaaaatattgccaccatttgtagaccacgtaaccttcaagtatgtgctacttttttgtccctgtatctaactcaaatcaggaactgtattttttttaatgatttgcttttgaaacttgaagtcttgaaaacagtgtgatgcaattactgctgttctagcccccaaagagttttctgtgcaaaatcttgagaatcaatcaataaagaaagatggaaggaagggagaaattggaatgttttaactgcagccctcagaactttagtaacagcacaacaaattaaaaacaaaaacaactcatgccacagtatgtcgtcttcatgtgtcttgcaatgaactgtttcagtagccaatcctctttcttagtatatgaaaggacagggatttttgttcttgttgttctcgttgttgttttaagtttactggggaaagtgcatttggccaaatgaaatggtagtcaagcctattgcaacaaagttaggaagtttgttgtttgtttattataaacaaaaagcatgtgaaagtgcacttaagatagagtttttattaattacttacttattacctagattttaaatagacaatccaaagtctccccttcgtgttgccatcatcttgttgaatcagccattttatcgaggcacgtgatcagtgttgcaacataatgaaaaagatggctactgtgccttgtgttacttaatcatacagtaagctgacctggaaatgaatgaaactattactcctaagaattacattgtatagccccacagattaaatttaattaattaattcaaaacatgttaaacgttactttcatgtactatggaaaagtacaagtaggtttacattactgatttccagaagtaagtagtttcccctttcctagtcttctgtgtatgtgatgttgttaatttcttttattgcattataaaataaaaggattatgtatttttaactaaggtgagacattgatatatccttttgctacaagctatagctaatgtgctgagcttgtgccttggtgattgattgattgattgactgattgttttaactgattactgtagatcaacctgatgatttgtttgtttgaaattggcaggaaaaatgcagctttcaaatcattggggggagaaaaaggatgtctttcaggattattttaattaatttttttcataattgagacagaactgtttgttatgtaccataatgctaaataaaactgtggcacttttcaccataatttaatttagtggaaaaagaagacaatgctttccatattgtgataaggtaacatggggtttttctgggccagcctttagaacactgttagggtacatacgctaccttgatgaaagggaccttcgtgcaactgtagtcatcttaaaggcttctcatccactgtgcttcttaatgtgtaattaaagtgaggagaaattaaatactctgagggcgttttatataataaattcgtgaagaaatgtgtgctcttcagttctcaagttttattattatggtatttattaaagttctacaattgtaataacgtatccatatgacaagttttaaagtggtaattgaaataggttatcagatatagagttgttcacatcaagtagacttttaacagagtcagaatgaacctacccttaaaattttagagaaaaaaaatcgtcggttgcacagaatagctgctctagcttgcttaattatgccgggcatgttgtcactcctcttacttttgctgccttttcattactatttaatggaatgtccctgaacaataaggaagagcaaaacatagacattttgactacagtggatacttcctctaccccaaatgttatgttataaaagtactttttttgcccaggtactctattatatattttggttttctttgaattagacctcaatctccaggaagctctggagggaaaaaaaggaaccataaactaaagtaactggttttccaaataaatgtaaacttttttaaccttttattattatagaacatttcaaacatacataaaacatgaaaacagcctgcagccaaacttttctggaccttggcagctccagcaaatgagctggtcatcctaaccctggtttcctgagacaactacttttggggatgcttgcttgtatagggagatgatagatagatagatacatatcaaaaagaaacttgaaaaaggcttcgaacagaacttgccgatgttactcatccctcctcggtacagacattctgttagaacagatggttgtaatggggcagcatcactccctattcccattaaaaacatgaccattctgagatttcaggccccttcgaggaatttttctcaagaattccatacaaactgtcagaggaagaaatgtcgtcccaagactagtccctgtgtagtcttgatccctttacctgcttactgtaattttttttctctgactttccgccagtgtctaagggccatctgtacccctcccacccttccatgagccactgtataatccaaaaacacaccttccatttgctccctcacttgtctccttttacctcaacagtgttagtgtgtaaagaattgcctggggagggtagagggttttacaagtacagagtcccaagtcttttctcccctccccgttagtgggttggcatttattaataggcactgcaagattttgatgcaggtgtggggtagatatcactgtgaaaggctactaatgcatggtagtttcaccgaaagtacagtcttcaaggatccttataatctcctcattgccaaaatcagtaacatctataaccttgacaacaccctagcttgggctgttgcttctctggctacttgtttttccatcccagtttacccagattttagatggatactcctccaattctgcttaaagtccttacctgttcttgcccagttccctctagtcaacctcagtcactcccaaagattcttccccaatcccatatcttttgctcagacctctgtctctgggatttctttgttacctcatagtcagtagtcctaaaaacaaaattcttcatcttgcatctctatcgaccgaccattctttgtttctttttaagaaatgtaaccttcaccccaatcatcaaaatctctcattcctcaattgtcacaggttgtcacttctttccccctaaacctctcccatcattccttccttctttatactgcccttacaggtcctgatcctctgactcacccggacattcttagcagctgcctaatttcactccctgactctcatctccctcttccaatccttttcattgtgctagaacactatcttgctaattttaatatcctctgcattcagtgcctccacagattgccccctcactgacctttccaatttggccttgtgttacacactttcctcgctgcattcctacccagcatcttcacttgtcatatttctcaaatactcttcatgaccagatatttaaagtacctcatccatgaagacttcatcaacccccaaagtgcctccaatgcttccgtggtagcacagcataatggggtacatttcttagttgaacagtgaggagtcactgggattcttacagagtgtcttagggtctcctcttgatactctttccacatttcagttaaggaattttcttacatctttttttcttctaataacctttgcctggagtgtaagtaaattcatgatagagactgtcatttttaaaaaaaaaaacaaaccattttgcctttcacatgttattacctccatctttctgttatcttgtcagtgttgccacctaaatgattgaaaatgaccgagcatgcagtagaatgtagtgaagtttcctatttcatccattttttgcataagtgcattggtatctgtatatccatctgcccaagcaccagttgttgaaaagactattatttccccatgaatggtcctggtacccttgtcaaagaacagttgaccataaatataagactttctggattctcagtcttactccattgccctatatgtctgtcgttataccagcaccgcactgtcttgatggctgtagcttggtagtaagtttagatttgggatgtgcaagtcctccattttttttttttttttccccaaaatcattttgtctgttttgggtcccttgcattgcatatgaatttttatatgatcattgtgtcaattcctgcaaaacagctgggatcttgatagggatttagttgaattggtagataaatttgagaaataactgctattttaatggtgttaggttttctgttccatgactgtgggatgtctttgcatttgcttaggtctttatttcagtgatgttttagagatttcagtgtgcaagtcttgacgtctttaatttttttctaagtattttactgatgccactttaattatatgattattttctaatttttatttttgtattcatcactggtgttagaaataaaattaatttttgtatattgattttgtatattgtagcttttctaaaattctttttttgtcacttagtattttttgcatatgagatcatgcatctgtgaacagaaatacttttacttcttcctttccagtctagattcctattatttcattttcttgccttagtgtgctggctagcacctccagtacaatattggatagaagtgacaagagcagacatctttttcttgttcctgattttaaggggaaagcattcagtctttcaccattgagtatgatgttagctagctgtgggtttgcttcaagttgaggaaattcttttattaaacctagtttactgagtgttttttaatcaaaaaaaaaaaaaggaggggctgtgggttttgttaaatgcttcttctgtatcaagattttcatgttgttttgtcctttattaatatgttgtattaatggacttttgtatattgaattaactttgcattcctgggataatctcagttgtccatgctacataaaccttgttctatgctgctgga

SEQ ID NO: 110 - DNA, 8955 bp, Homo sapiens
  source 1..8955: mol_type = genomic DNA
agtcctcccgtcttgcgccgcggccgcgagatccgtgtgtctcccaagatggtggcgctgggctcggggtgactacaggagacgacggggccttttcccttcgccaggacccgacacaccaggcttcgctcgctcgcgcacccctccgccgcgtagccatccgccagcgcgggcgcccgccatccgccgcctacttacgcttcacctctgccgacccggcgcgctcggctgcgggcggcggcgcctccttcggctcctcctcggaatagctcgcggcctgtagcccctggcaggagggcccctcagccccccggtgtggacaggcagcggcggctggcgacgaacgccgggatttcggcggccccggcgctccctttcccggcctcgttttccggataaggaagcgcgggtcccgcatgagccccggcggtggcggcagcgaaagagaacgaggcggtggcgggcggaggcggcgggcgagggcgactacgaccagtgaggcggccgccgcagcccaggcgcgggggcgacgacaggttaaaaatctgtaagagcctgattttagaattcaccagctcctcagaagtttggcgaaatatgagttattaagcctacgctcagatcaaggtagcagctagactggtgtgacaacctgtttttaatcagtgactcaaagctgtgatcaccctgatgtcaccgaatggccacagcttgtaaaagagagttacagtggaggtaaaaggagtggcttgcaggatggagaagctgcaccagtgttattggaactctgcctccttacagtatgacatctgatgctggagggtcgcactttcaaaaatgagtcagctggtacatggggttatcatcaatttttagctcttctgtctgggagatacaagtttggaagcaatcttggggtacttacccacaaggctggtggagaccagatcaggagaacctcagtctgacgacattgaagctagccgaatgaagcgagcagctgcaaagcatctaatagaacgctactaccaccagttaactgagggctgtggaaatgaagcctgcacgaatgagttttgtgcttcctgtccaacttttcttcgtatggataataatgcagcagctattaaagccctcgagctttataagattaatgcaaaactctgtgatcctcatccctccaagaaaggagcaagctcagcttaccttgagaactcgaaaggtgcccccaacaactcctgctctgagataaaaatgaacaagaaaggcgctagaattgattttaaagatgtgacttacttaacagaagagaaggtatatgaaattcttgaattatgtagagaaagagaggattattcccctttaatccgtgttattggaagagttttttctagtgctgaggcattggtacagagcttccggaaagttaaacaacacaccaaggaagaactgaaatctcttcaagcaaaagatgaagacaaagatgaagatgaaaaggaaaaagctgcatgttctgctgctgctatggaagaagactcagaagcatcttcctcaaggataggtgatagctcacagggagacaacaatttgcaaaaattaggccctgatgatgtgtctgtggatattgatgccattagaagggtctacaccagattgctctctaatgaaaaaattgaaactgcctttctcaatgcacttgtatatttgtcacctaacgtggaatgtgacttgacgtatcacaatgtatactctcgagatcctaattatctgaatttgttcattatcgtaatggagaatagaaatctccacagtcctgaatatctggaaatggctttgccattattttgcaaagcgatgagcaagctaccccttgcagcccaaggaaaactgatcagactgtggtctaaatacaatgcagaccagattcggagaatgatggagacatttcagcaacttattacttataaagtcataagcaatgaatttaacagtcgaaatctagtgaatgatgatgatgccattgttgctgcttcgaagtgcttgaaaatggtttactatgcaaatgtagtgggaggggaagtggacacaaatcacaatgaagaagatgatgaagagcccatccctgagtccagcgagctgacacttcaggaacttttgggagaagaaagaagaaacaagaaaggtcctcgagtggaccccctggaaactgaacttggtgttaaaaccctggattgtcgaaaaccacttatcccttttgaagagtttattaatgaaccactgaatgaggttctagaaatggataaagattatacttttttcaaagtagaaacagagaacaaattctcttttatgacatgtccctttatattgaatgctgtcacaaagaatttgggattatattatgacaatagaattcgcatgtacagtgaacgaagaatcactgttctctacagcttagttcaaggacagcagttgaatccatatttgagactcaaagttagacgtgaccatatcatagatgatgcacttgtccggctagagatgatcgctatggaaaatcctgcagacttgaagaagcagttgtatgtggaatttgaaggagaacaaggagttgatgagggaggtgtttccaaagaattttttcagctggttgtggaggaaatcttcaatccagatattggtatgttcacatacgatgaatctacaaaattgttttggtttaatccatcttcttttgaaactgagggtcagtttactctgattggcatagtactgggtctggctatttacaataactgtatactggatgtacattttcccatggttgtctacaggaagctaatggggaaaaaaggaacttttcgtgacttgggagactctcacccagttctatatcagagtttaaaagatttattggagtatgaagggaatgtggaagatgacatgatgatcactttccagatatcacagacagatctttttggtaacccaatgatgtatgatctaaaggaaaatggtgataaaattccaattacaaatgaaaacaggaaggaatttgtcaatctttattctgactacattctcaataaatcagtagaaaaacagttcaaggcttttcggagaggttttcatatggtgaccaatgaatctcccttaaagtacttattcagaccagaagaaattgaattgcttatatgtggaagccggaatctagatttccaagcactagaagaaactacagaatatgacggtggctataccagggactctgttctgattagggagttctgggaaatcgttcattcatttacagatgaacagaaaagactcttcttgcagtttacaacgggcacagacagagcacctgtgggaggactaggaaaattaaagatgattatagccaaaaatggcccagacacagaaaggttacctacatctcatacttgctttaatgtgcttttacttccggaatactcaagcaaagaaaaacttaaagagagattgttgaaggccatcacgtatgccaaaggatttggcatgctgtaaaacaaaacaaaacaaaataaaacaaaaaaaaggaaggaaaaaaaaagaaaaaatttaaaaaattttaaaaatataacgagggataaatttttggtggtgatagtgtcccagtacaaaaaggctgtaagatagtcaaccacagtagtcacctatgtctgtgcctcccttctttattggggacatgtgggctggaacagcagatttcagctacatatatgaacaaatcctttattattattataattatttttttgcgtgaaagtgttacatattctttcacttgtatgtacagagaggtttttctgaatatttattttaagggttaaatcacttttgcttgtgtttattactgcttgaggttgagccttttgagtatttaaaaaatatataccaacagaactactctcccaaggaaaatattgccaccatttgtagaccacgtaaccttcaagtatgtgctacttttttgtccctgtatctaactcaaatcaggaactgtattttttttaatgatttgcttttgaaacttgaagtcttgaaaacagtgtgatgcaattactgctgttctagcccccaaagagttttctgtgcaaaatcttgagaatcaatcaataaagaaagatggaaggaagggagaaattggaatgttttaactgcagccctcagaactttagtaacagcacaacaaattaaaaacaaaaacaactcatgccacagtatgtcgtcttcatgtgtcttgcaatgaactgtttcagtagccaatcctctttcttagtatatgaaaggacagggatttttgttcttgttgttctcgttgttgttttaagtttactggggaaagtgcatttggccaaatgaaatggtagtcaagcctattgcaacaaagttaggaagtttgttgtttgtttattataaacaaaaagcatgtgaaagtgcacttaagatagagtttttattaattacttacttattacctagattttaaatagacaatccaaagtctccccttcgtgttgccatcatcttgttgaatcagccattttatcgaggcacgtgatcagtgttgcaacataatgaaaaagatggctactgtgccttgtgttacttaatcatacagtaagctgacctggaaatgaatgaaactattactcctaagaattacattgtatagccccacagattaaatttaattaattaattcaaaacatgttaaacgttactttcatgtactatggaaaagtacaagtaggtttacattactgatttccagaagtaagtagtttcccctttcctagtcttctgtgtatgtgatgttgttaatttcttttattgcattataaaataaaaggattatgtatttttaactaaggtgagacattgatatatccttttgctacaagctatagctaatgtgctgagcttgtgccttggtgattgattgattgattgactgattgttttaactgattactgtagatcaacctgatgatttgtttgtttgaaattggcaggaaaaatgcagctttcaaatcattggggggagaaaaaggatgtctttcaggattattttaattaatttttttcataattgagacagaactgtttgttatgtaccataatgctaaataaaactgtggcacttttcaccataatttaatttagtggaaaaagaagacaatgctttccatattgtgataaggtaacatggggtttttctgggccagcctttagaacactgttagggtacatacgctaccttgatgaaagggaccttcgtgcaactgtagtcatcttaaaggcttctcatccactgtgcttcttaatgtgtaattaaagtgaggagaaattaaatactctgagggcgttttatataataaattcgtgaagaaatgtgtgctcttcagttctcaagttttattattatggtatttattaaagttctacaattgtaataacgtatccatatgacaagttttaaagtggtaattgaaataggttatcagatatagagttgttcacatcaagtagacttttaacagagtcagaatgaacctacccttaaaattttagagaaaaaaaatcgtcggttgcacagaatagctgctctagcttgcttaattatgccgggcatgttgtcactcctcttacttttgctgccttttcattactatttaatggaatgtccctgaacaataaggaagagcaaaacatagacattttgactacagtggatacttcctctaccccaaatgttatgttataaaagtactttttttgcccaggtactctattatatattttggttttctttgaattagacctcaatctccaggaagctctggagggaaaaaaaggaaccataaactaaagtaactggttttccaaataaatgtaaacttttttaaccttttattattatagaacatttcaaacatacataaaacatgaaaacagcctgcagccaaacttttctggaccttggcagctccagcaaatgagctggtcatcctaaccctggtttcctgagacaactacttttggggatgcttgcttgtatagggagatgatagatagatagatacatatcaaaaagaaacttgaaaaaggcttcgaacagaacttgccgatgttactcatccctcctcggtacagacattctgttagaacagatggttgtaatggggcagcatcactccctattcccattaaaaacatgaccattctgagatttcaggccccttcgaggaatttttctcaagaattccatacaaactgtcagaggaagaaatgtcgtcccaagactagtccctgtgtagtcttgatccctttacctgcttactgtaattttttttctctgactttccgccagtgtctaagggccatctgtacccctcccacccttccatgagccactgtataatccaaaaacacaccttccatttgctccctcacttgtctccttttacctcaacagtgttagtgtgtaaagaattgcctggggagggtagagggttttacaagtacagagtcccaagtcttttctcccctccccgttagtgggttggcatttattaataggcactgcaagattttgatgcaggtgtggggtagatatcactgtgaaaggctactaatgcatggtagtttcaccgaaagtacagtcttcaaggatccttataatctcctcattgccaaaatcagtaacatctataaccttgacaacaccctagcttgggctgttgcttctctggctacttgtttttccatcccagtttacccagattttagatggatactcctccaattctgcttaaagtccttacctgttcttgcccagttccctctagtcaacctcagtcactcccaaagattcttccccaatcccatatcttttgctcagacctctgtctctgggatttctttgttacctcatagtcagtagtcctaaaaacaaaattcttcatcttgcatctctatcgaccgaccattctttgtttctttttaagaaatgtaaccttcaccccaatcatcaaaatctctcattcctcaattgtcacaggttgtcacttctttccccctaaacctctcccatcattccttccttctttatactgcccttacaggtcctgatcctctgactcacccggacattcttagcagctgcctaatttcactccctgactctcatctccctcttccaatccttttcattgtgctagaacactatcttgctaattttaatatcctctgcattcagtgcctccacagattgccccctcactgacctttccaatttggccttgtgttacacactttcctcgctgcattcctacccagcatcttcacttgtcatatttctcaaatactcttcatgaccagatatttaaagtacctcatccatgaagacttcatcaacccccaaagtgcctccaatgcttccgtggtagcacagcataatggggtacatttcttagttgaacagtgaggagtcactgggattcttacagagtgtcttagggtctcctcttgatactctttccacatttcagttaaggaattttcttacatctttttttcttctaataacctttgcctggagtgtaagtaaattcatgatagagactgtcatttttaaaaaaaaaaacaaaccattttgcctttcacatgttattacctccatctttctgttatcttgtcagtgttgccacctaaatgattgaaaatgaccgagcatgcagtagaatgtagtgaagtttcctatttcatccattttttgcataagtgcattggtatctgtatatccatctgcccaagcaccagttgttgaaaagactattatttccccatgaatggtcctggtacccttgtcaaagaacagttgaccataaatataagactttctggattctcagtcttactccattgccctatatgtctgtcgttataccagcaccgcactgtcttgatggctgtagcttggtagtaagtttagatttgggatgtgcaagtcctccattttttttttttttttccccaaaatcattttgtctgttttgggtcccttgcattgcatatgaatttttatatgatcattgtgtcaattcctgcaaaacagctgggatcttgatagggatttagttgaattggtagataaatttgagaaataactgctattttaatggtgttaggttttctgttccatgactgtgggatgtctttgcatttgcttaggtctttatttcagtgatgttttagagatttcagtgtgcaagtcttgacgtctttaatttttttctaagtattttactgatgccactttaattatatgattattttctaatttttatttttgtattcatcactggtgttagaaataaaattaatttttgtatattgattttgtatattgtagcttttctaaaattctttttttgtcacttagtattttttgcatatgagatcatgcatctgtgaacagaaatacttttacttcttcctttccagtctagattcctattatttcattttcttgccttagtgtgctggctagcacctccagtacaatattggatagaagtgacaagagcagacatctttttcttgttcctgattttaaggggaaagcattcagtctttcaccattgagtatgatgttagctagctgtgggtttgcttcaagttgaggaaattcttttattaaacctagtttactgagtgttttttaatcaaaaaaaaaaaaaggaggggctgtgggttttgttaaatgcttcttctgtatcaagattttcatgttgttttgtcctttattaatatgttgtattaatggacttttgtatattgaattaactttgcattcctgggataatctcagttgtccatgctacataaaccttgttctatgctgctgga

SEQ ID NO: 111 - DNA, 8572 bp, Homo sapiens
  source 1..8572: mol_type = genomic DNA
agtcctcccgtcttgcgccgcggccgcgagatccgtgtgtctcccaagatggtggcgctgggctcggggtgactacaggagacgacggggccttttcccttcgccaggacccgacacaccaggcttcgctcgctcgcgcacccctccgccgcgtagccatccgccagcgcgggcgcccgccatccgccgcctacttacgcttcacctctgccgacccggcgcgctcggctgcgggcggcggcgcctccttcggctcctcctcggaatagctcgcggcctgtagcccctggcaggagggcccctcagccccccggtgtggacaggcagcggcggctggcgacgaacgccgggatttcggcggccccggcgctccctttcccggcctcgttttccggataaggaagcgcgggtcccgcatgagccccggcggtggcggcagcgaaagagaacgaggcggtggcgggcggaggcggcgggcgagggcgactacgaccagtgaggcggccgccgcagcccaggcgcgggggcgacgacaggttaaaaatctgtaagagcctgattttagaattcaccagctcctcagaagtttggcgaaatatgagttattaagcctacgctcagatcaaggtagcagctagactggtgtgacaacctgtttttaatcagtgactcaaagctgtgatcaccctgatgtcaccgaatggccacagcttgtaaaagatcaggagaacctcagtctgacgacattgaagctagccgaatgaagcgagcagctgcaaagcatctaatagaacgctactaccaccagttaactgagggctgtggaaatgaagcctgcacgaatgagttttgtgcttcctgtccaacttttcttcgtatggataataatgcagcagctattaaagccctcgagctttataagattaatgcaaaactctgtgatcctcatccctccaagaaaggagcaagctcagcttaccttgagaactcgaaaggtgcccccaacaactcctgctctgagataaaaatgaacaagaaaggcgctagaattgattttaaagatgtgacttacttaacagaagagaaggtatatgaaattcttgaattatgtagagaaagagaggattattcccctttaatccgtgttattggaagagttttttctagtgctgaggcattggtacagagcttccggaaagttaaacaacacaccaaggaagaactgaaatctcttcaagcaaaagatgaagacaaagatgaagatgaaaaggaaaaagctgcatgttctgctgctgctatggaagaagactcagaagcatcttcctcaaggataggtgatagctcacagggagacaacaatttgcaaaaattaggccctgatgatgtgtctgtggatattgatgccattagaagggtctacaccagattgctctctaatgaaaaaattgaaactgcctttctcaatgcacttgtatatttgtcacctaacgtggaatgtgacttgacgtatcacaatgtatactctcgagatcctaattatctgaatttgttcattatcgtaatggagaatagaaatctccacagtcctgaatatctggaaatggctttgccattattttgcaaagcgatgagcaagctaccccttgcagcccaaggaaaactgatcagactgtggtctaaatacaatgcagaccagattcggagaatgatggagacatttcagcaacttattacttataaagtcataagcaatgaatttaacagtcgaaatctagtgaatgatgatgatgccattgttgctgcttcgaagtgcttgaaaatggtttactatgcaaatgtagtgggaggggaagtggacacaaatcacaatgaagaagatgatgaagagcccatccctgagtccagcgagctgacacttcaggaacttttgggagaagaaagaagaaacaagaaaggtcctcgagtggaccccctggaaactgaacttggtgttaaaaccctggattgtcgaaaaccacttatcccttttgaagagtttattaatgaaccactgaatgaggttctagaaatggataaagattatacttttttcaaagtagaaacagagaacaaattctcttttatgacatgtccctttatattgaatgctgtcacaaagaatttgggattatattatgacaatagaattcgcatgtacagtgaacgaagaatcactgttctctacagcttagttcaaggacagcagttgaatccatatttgagactcaaagttagacgtgaccatatcatagatgatgcacttgtccggctagagatgatcgctatggaaaatcctgcagacttgaagaagcagttgtatgtggaatttgaaggagaacaaggagttgatgagggaggtgtttccaaagaattttttcagctggttgtggaggaaatcttcaatccagatattggtatgttcacatacgatgaatctacaaaattgttttggtttaatccatcttcttttgaaactgagggtcagtttactctgattggcatagtactgggtctggctatttacaataactgtatactggatgtacattttcccatggttgtctacaggaagctaatggggaaaaaaggaacttttcgtgacttgggagactctcacccagttctatatcagagtttaaaagatttattggagtatgaagggaatgtggaagatgacatgatgatcactttccagatatcacagacagatctttttggtaacccaatgatgtatgatctaaaggaaaatggtgataaaattccaattacaaatgaaaacaggaagaatctagatttccaagcactagaagaaactacagaatatgacggtggctataccagggactctgttctgattagggagttctgggaaatcgttcattcatttacagatgaacagaaaagactcttcttgcagtttacaacgggcacagacagagcacctgtgggaggactaggaaaattaaagatgattatagccaaaaatggcccagacacagaaaggttacctacatctcatacttgctttaatgtgcttttacttccggaatactcaagcaaagaaaaacttaaagagagattgttgaaggccatcacgtatgccaaaggatttggcatgctgtaaaacaaaacaaaacaaaataaaacaaaaaaaaggaaggaaaaaaaaagaaaaaatttaaaaaattttaaaaatataacgagggataaatttttggtggtgatagtgtcccagtacaaaaaggctgtaagatagtcaaccacagtagtcacctatgtctgtgcctcccttctttattggggacatgtgggctggaacagcagatttcagctacatatatgaacaaatcctttattattattataattatttttttgcgtgaaagtgttacatattctttcacttgtatgtacagagaggtttttctgaatatttattttaagggttaaatcacttttgcttgtgtttattactgcttgaggttgagccttttgagtatttaaaaaatatataccaacagaactactctcccaaggaaaatattgccaccatttgtagaccacgtaaccttcaagtatgtgctacttttttgtccctgtatctaactcaaatcaggaactgtattttttttaatgatttgcttttgaaacttgaagtcttgaaaacagtgtgatgcaattactgctgttctagcccccaaagagttttctgtgcaaaatcttgagaatcaatcaataaagaaagatggaaggaagggagaaattggaatgttttaactgcagccctcagaactttagtaacagcacaacaaattaaaaacaaaaacaactcatgccacagtatgtcgtcttcatgtgtcttgcaatgaactgtttcagtagccaatcctctttcttagtatatgaaaggacagggatttttgttcttgttgttctcgttgttgttttaagtttactggggaaagtgcatttggccaaatgaaatggtagtcaagcctattgcaacaaagttaggaagtttgttgtttgtttattataaacaaaaagcatgtgaaagtgcacttaagatagagtttttattaattacttacttattacctagattttaaatagacaatccaaagtctccccttcgtgttgccatcatcttgttgaatcagccattttatcgaggcacgtgatcagtgttgcaacataatgaaaaagatggctactgtgccttgtgttacttaatcatacagtaagctgacctggaaatgaatgaaactattactcctaagaattacattgtatagccccacagattaaatttaattaattaattcaaaacatgttaaacgttactttcatgtactatggaaaagtacaagtaggtttacattactgatttccagaagtaagtagtttcccctttcctagtcttctgtgtatgtgatgttgttaatttcttttattgcattataaaataaaaggattatgtatttttaactaaggtgagacattgatatatccttttgctacaagctatagctaatgtgctgagcttgtgccttggtgattgattgattgattgactgattgttttaactgattactgtagatcaacctgatgatttgtttgtttgaaattggcaggaaaaatgcagctttcaaatcattggggggagaaaaaggatgtctttcaggattattttaattaatttttttcataattgagacagaactgtttgttatgtaccataatgctaaataaaactgtggcacttttcaccataatttaatttagtggaaaaagaagacaatgctttccatattgtgataaggtaacatggggtttttctgggccagcctttagaacactgttagggtacatacgctaccttgatgaaagggaccttcgtgcaactgtagtcatcttaaaggcttctcatccactgtgcttcttaatgtgtaattaaagtgaggagaaattaaatactctgagggcgttttatataataaattcgtgaagaaatgtgtgctcttcagttctcaagttttattattatggtatttattaaagttctacaattgtaataacgtatccatatgacaagttttaaagtggtaattgaaataggttatcagatatagagttgttcacatcaagtagacttttaacagagtcagaatgaacctacccttaaaattttagagaaaaaaaatcgtcggttgcacagaatagctgctctagcttgcttaattatgccgggcatgttgtcactcctcttacttttgctgccttttcattactatttaatggaatgtccctgaacaataaggaagagcaaaacatagacattttgactacagtggatacttcctctaccccaaatgttatgttataaaagtactttttttgcccaggtactctattatatattttggttttctttgaattagacctcaatctccaggaagctctggagggaaaaaaaggaaccataaactaaagtaactggttttccaaataaatgtaaacttttttaaccttttattattatagaacatttcaaacatacataaaacatgaaaacagcctgcagccaaacttttctggaccttggcagctccagcaaatgagctggtcatcctaaccctggtttcctgagacaactacttttggggatgcttgcttgtatagggagatgatagatagatagatacatatcaaaaagaaacttgaaaaaggcttcgaacagaacttgccgatgttactcatccctcctcggtacagacattctgttagaacagatggttgtaatggggcagcatcactccctattcccattaaaaacatgaccattctgagatttcaggccccttcgaggaatttttctcaagaattccatacaaactgtcagaggaagaaatgtcgtcccaagactagtccctgtgtagtcttgatccctttacctgcttactgtaattttttttctctgactttccgccagtgtctaagggccatctgtacccctcccacccttccatgagccactgtataatccaaaaacacaccttccatttgctccctcacttgtctccttttacctcaacagtgttagtgtgtaaagaattgcctggggagggtagagggttttacaagtacagagtcccaagtcttttctcccctccccgttagtgggttggcatttattaataggcactgcaagattttgatgcaggtgtggggtagatatcactgtgaaaggctactaatgcatggtagtttcaccgaaagtacagtcttcaaggatccttataatctcctcattgccaaaatcagtaacatctataaccttgacaacaccctagcttgggctgttgcttctctggctacttgtttttccatcccagtttacccagattttagatggatactcctccaattctgcttaaagtccttacctgttcttgcccagttccctctagtcaacctcagtcactcccaaagattcttccccaatcccatatcttttgctcagacctctgtctctgggatttctttgttacctcatagtcagtagtcctaaaaacaaaattcttcatcttgcatctctatcgaccgaccattctttgtttctttttaagaaatgtaaccttcaccccaatcatcaaaatctctcattcctcaattgtcacaggttgtcacttctttccccctaaacctctcccatcattccttccttctttatactgcccttacaggtcctgatcctctgactcacccggacattcttagcagctgcctaatttcactccctgactctcatctccctcttccaatccttttcattgtgctagaacactatcttgctaattttaatatcctctgcattcagtgcctccacagattgccccctcactgacctttccaatttggccttgtgttacacactttcctcgctgcattcctacccagcatcttcacttgtcatatttctcaaatactcttcatgaccagatatttaaagtacctcatccatgaagacttcatcaacccccaaagtgcctccaatgcttccgtggtagcacagcataatggggtacatttcttagttgaacagtgaggagtcactgggattcttacagagtgtcttagggtctcctcttgatactctttccacatttcagttaaggaattttcttacatctttttttcttctaataacctttgcctggagtgtaagtaaattcatgatagagactgtcatttttaaaaaaaaaaacaaaccattttgcctttcacatgttattacctccatctttctgttatcttgtcagtgttgccacctaaatgattgaaaatgaccgagcatgcagtagaatgtagtgaagtttcctatttcatccattttttgcataagtgcattggtatctgtatatccatctgcccaagcaccagttgttgaaaagactattatttccccatgaatggtcctggtacccttgtcaaagaacagttgaccataaatataagactttctggattctcagtcttactccattgccctatatgtctgtcgttataccagcaccgcactgtcttgatggctgtagcttggtagtaagtttagatttgggatgtgcaagtcctccattttttttttttttttccccaaaatcattttgtctgttttgggtcccttgcattgcatatgaatttttatatgatcattgtgtcaattcctgcaaaacagctgggatcttgatagggatttagttgaattggtagataaatttgagaaataactgctattttaatggtgttaggttttctgttccatgactgtgggatgtctttgcatttgcttaggtctttatttcagtgatgttttagagatttcagtgtgcaagtcttgacgtctttaatttttttctaagtattttactgatgccactttaattatatgattattttctaatttttatttttgtattcatcactggtgttagaaataaaattaatttttgtatattgattttgtatattgtagcttttctaaaattctttttttgtcacttagtattttttgcatatgagatcatgcatctgtgaacagaaatacttttacttcttcctttccagtctagattcctattatttcattttcttgccttagtgtgctggctagcacctccagtacaatattggatagaagtgacaagagcagacatctttttcttgttcctgattttaaggggaaagcattcagtctttcaccattgagtatgatgttagctagctgtgggtttgcttcaagttgaggaaattcttttattaaacctagtttactgagtgttttttaatcaaaaaaaaaaaaaggaggggctgtgggttttgttaaatgcttcttctgtatcaagattttcatgttgttttgtcctttattaatatgttgtattaatggacttttgtatattgaattaactttgcattcctgggataatctcagttgtccatgctacataaaccttgttctatgctgctgga

SEQ ID NO: 112 - DNA, 8502 bp, Homo sapiens
  source 1..8502: mol_type = genomic DNA
agtcctcccgtcttgcgccgcggccgcgagatccgtgtgtctcccaagatggtggcgctgggctcggggtgactacaggagacgacggggccttttcccttcgccaggacccgacacaccaggcttcgctcgctcgcgcacccctccgccgcgtagccatccgccagcgcgggcgcccgccatccgccgcctacttacgcttcacctctgccgacccggcgcgctcggctgcgggcggcggcgcctccttcggctcctcctcggaatagctcgcggcctgtagcccctggcaggagggcccctcagccccccggtgtggacaggcagcggcggctggcgacgaacgccgggatttcggcggccccggcgctccctttcccggcctcgttttccggataaggaagcgcgggtcccgcatgagccccggcggtggcggcagcgaaagagaacgaggcggtggcgggcggaggcggcgggcgagggcgactacgaccagtgaggcggccgccgcagcccaggcgcgggggcgacgacaggaagcgagcagctgcaaagcatctaatagaacgctactaccaccagttaactgagggctgtggaaatgaagcctgcacgaatgagttttgtgcttcctgtccaacttttcttcgtatggataataatgcagcagctattaaagccctcgagctttataagattaatgcaaaactctgtgatcctcatccctccaagaaaggagcaagctcagcttaccttgagaactcgaaaggtgcccccaacaactcctgctctgagataaaaatgaacaagaaaggcgctagaattgattttaaagatgtgacttacttaacagaagagaaggtatatgaaattcttgaattatgtagagaaagagaggattattcccctttaatccgtgttattggaagagttttttctagtgctgaggcattggtacagagcttccggaaagttaaacaacacaccaaggaagaactgaaatctcttcaagcaaaagatgaagacaaagatgaagatgaaaaggaaaaagctgcatgttctgctgctgctatggaagaagactcagaagcatcttcctcaaggataggtgatagctcacagggagacaacaatttgcaaaaattaggccctgatgatgtgtctgtggatattgatgccattagaagggtctacaccagattgctctctaatgaaaaaattgaaactgcctttctcaatgcacttgtatatttgtcacctaacgtggaatgtgacttgacgtatcacaatgtatactctcgagatcctaattatctgaatttgttcattatcgtaatggagaatagaaatctccacagtcctgaatatctggaaatggctttgccattattttgcaaagcgatgagcaagctaccccttgcagcccaaggaaaactgatcagactgtggtctaaatacaatgcagaccagattcggagaatgatggagacatttcagcaacttattacttataaagtcataagcaatgaatttaacagtcgaaatctagtgaatgatgatgatgccattgttgctgcttcgaagtgcttgaaaatggtttactatgcaaatgtagtgggaggggaagtggacacaaatcacaatgaagaagatgatgaagagcccatccctgagtccagcgagctgacacttcaggaacttttgggagaagaaagaagaaacaagaaaggtcctcgagtggaccccctggaaactgaacttggtgttaaaaccctggattgtcgaaaaccacttatcccttttgaagagtttattaatgaaccactgaatgaggttctagaaatggataaagattatacttttttcaaagtagaaacagagaacaaattctcttttatgacatgtccctttatattgaatgctgtcacaaagaatttgggattatattatgacaatagaattcgcatgtacagtgaacgaagaatcactgttctctacagcttagttcaaggacagcagttgaatccatatttgagactcaaagttagacgtgaccatatcatagatgatgcacttgtccggctagagatgatcgctatggaaaatcctgcagacttgaagaagcagttgtatgtggaatttgaaggagaacaaggagttgatgagggaggtgtttccaaagaattttttcagctggttgtggaggaaatcttcaatccagatattggtatgttcacatacgatgaatctacaaaattgttttggtttaatccatcttcttttgaaactgagggtcagtttactctgattggcatagtactgggtctggctatttacaataactgtatactggatgtacattttcccatggttgtctacaggaagctaatggggaaaaaaggaacttttcgtgacttgggagactctcacccagttctatatcagagtttaaaagatttattggagtatgaagggaatgtggaagatgacatgatgatcactttccagatatcacagacagatctttttggtaacccaatgatgtatgatctaaaggaaaatggtgataaaattccaattacaaatgaaaacaggaaggaatttgtcaatctttattctgactacattctcaataaatcagtagaaaaacagttcaaggcttttcggagaggttttcatatggtgaccaatgaatctcccttaaagtacttattcagaccagaagaaattgaattgcttatatgtggaagccggaatctagatttccaagcactagaagaaactacagaatatgacggtggctataccagggactctgttctgattagggagttctgggaaatcgttcattcatttacagatgaacagaaaagactcttcttgcagtttacaacgggcacagacagagcacctgtgggaggactaggaaaattaaagatgattatagccaaaaatggcccagacacagaaaggttacctacatctcatacttgctttaatgtgcttttacttccggaatactcaagcaaagaaaaacttaaagagagattgttgaaggccatcacgtatgccaaaggatttggcatgctgtaaaacaaaacaaaacaaaataaaacaaaaaaaaggaaggaaaaaaaaagaaaaaatttaaaaaattttaaaaatataacgagggataaatttttggtggtgatagtgtcccagtacaaaaaggctgtaagatagtcaaccacagtagtcacctatgtctgtgcctcccttctttattggggacatgtgggctggaacagcagatttcagctacatatatgaacaaatcctttattattattataattatttttttgcgtgaaagtgttacatattctttcacttgtatgtacagagaggtttttctgaatatttattttaagggttaaatcacttttgcttgtgtttattactgcttgaggttgagccttttgagtatttaaaaaatatataccaacagaactactctcccaaggaaaatattgccaccatttgtagaccacgtaaccttcaagtatgtgctacttttttgtccctgtatctaactcaaatcaggaactgtattttttttaatgatttgcttttgaaacttgaagtcttgaaaacagtgtgatgcaattactgctgttctagcccccaaagagttttctgtgcaaaatcttgagaatcaatcaataaagaaagatggaaggaagggagaaattggaatgttttaactgcagccctcagaactttagtaacagcacaacaaattaaaaacaaaaacaactcatgccacagtatgtcgtcttcatgtgtcttgcaatgaactgtttcagtagccaatcctctttcttagtatatgaaaggacagggatttttgttcttgttgttctcgttgttgttttaagtttactggggaaagtgcatttggccaaatgaaatggtagtcaagcctattgcaacaaagttaggaagtttgttgtttgtttattataaacaaaaagcatgtgaaagtgcacttaagatagagtttttattaattacttacttattacctagattttaaatagacaatccaaagtctccccttcgtgttgccatcatcttgttgaatcagccattttatcgaggcacgtgatcagtgttgcaacataatgaaaaagatggctactgtgccttgtgttacttaatcatacagtaagctgacctggaaatgaatgaaactattactcctaagaattacattgtatagccccacagattaaatttaattaattaattcaaaacatgttaaacgttactttcatgtactatggaaaagtacaagtaggtttacattactgatttccagaagtaagtagtttcccctttcctagtcttctgtgtatgtgatgttgttaatttcttttattgcattataaaataaaaggattatgtatttttaactaaggtgagacattgatatatccttttgctacaagctatagctaatgtgctgagcttgtgccttggtgattgattgattgattgactgattgttttaactgattactgtagatcaacctgatgatttgtttgtttgaaattggcaggaaaaatgcagctttcaaatcattggggggagaaaaaggatgtctttcaggattattttaattaatttttttcataattgagacagaactgtttgttatgtaccataatgctaaataaaactgtggcacttttcaccataatttaatttagtggaaaaagaagacaatgctttccatattgtgataaggtaacatggggtttttctgggccagcctttagaacactgttagggtacatacgctaccttgatgaaagggaccttcgtgcaactgtagtcatcttaaaggcttctcatccactgtgcttcttaatgtgtaattaaagtgaggagaaattaaatactctgagggcgttttatataataaattcgtgaagaaatgtgtgctcttcagttctcaagttttattattatggtatttattaaagttctacaattgtaataacgtatccatatgacaagttttaaagtggtaattgaaataggttatcagatatagagttgttcacatcaagtagacttttaacagagtcagaatgaacctacccttaaaattttagagaaaaaaaatcgtcggttgcacagaatagctgctctagcttgcttaattatgccgggcatgttgtcactcctcttacttttgctgccttttcattactatttaatggaatgtccctgaacaataaggaagagcaaaacatagacattttgactacagtggatacttcctctaccccaaatgttatgttataaaagtactttttttgcccaggtactctattatatattttggttttctttgaattagacctcaatctccaggaagctctggagggaaaaaaaggaaccataaactaaagtaactggttttccaaataaatgtaaacttttttaaccttttattattatagaacatttcaaacatacataaaacatgaaaacagcctgcagccaaacttttctggaccttggcagctccagcaaatgagctggtcatcctaaccctggtttcctgagacaactacttttggggatgcttgcttgtatagggagatgatagatagatagatacatatcaaaaagaaacttgaaaaaggcttcgaacagaacttgccgatgttactcatccctcctcggtacagacattctgttagaacagatggttgtaatggggcagcatcactccctattcccattaaaaacatgaccattctgagatttcaggccccttcgaggaatttttctcaagaattccatacaaactgtcagaggaagaaatgtcgtcccaagactagtccctgtgtagtcttgatccctttacctgcttactgtaattttttttctctgactttccgccagtgtctaagggccatctgtacccctcccacccttccatgagccactgtataatccaaaaacacaccttccatttgctccctcacttgtctccttttacctcaacagtgttagtgtgtaaagaattgcctggggagggtagagggttttacaagtacagagtcccaagtcttttctcccctccccgttagtgggttggcatttattaataggcactgcaagattttgatgcaggtgtggggtagatatcactgtgaaaggctactaatgcatggtagtttcaccgaaagtacagtcttcaaggatccttataatctcctcattgccaaaatcagtaacatctataaccttgacaacaccctagcttgggctgttgcttctctggctacttgtttttccatcccagtttacccagattttagatggatactcctccaattctgcttaaagtccttacctgttcttgcccagttccctctagtcaacctcagtcactcccaaagattcttccccaatcccatatcttttgctcagacctctgtctctgggatttctttgttacctcatagtcagtagtcctaaaaacaaaattcttcatcttgcatctctatcgaccgaccattctttgtttctttttaagaaatgtaaccttcaccccaatcatcaaaatctctcattcctcaattgtcacaggttgtcacttctttccccctaaacctctcccatcattccttccttctttatactgcccttacaggtcctgatcctctgactcacccggacattcttagcagctgcctaatttcactccctgactctcatctccctcttccaatccttttcattgtgctagaacactatcttgctaattttaatatcctctgcattcagtgcctccacagattgccccctcactgacctttccaatttggccttgtgttacacactttcctcgctgcattcctacccagcatcttcacttgtcatatttctcaaatactcttcatgaccagatatttaaagtacctcatccatgaagacttcatcaacccccaaagtgcctccaatgcttccgtggtagcacagcataatggggtacatttcttagttgaacagtgaggagtcactgggattcttacagagtgtcttagggtctcctcttgatactctttccacatttcagttaaggaattttcttacatctttttttcttctaataacctttgcctggagtgtaagtaaattcatgatagagactgtcatttttaaaaaaaaaaacaaaccattttgcctttcacatgttattacctccatctttctgttatcttgtcagtgttgccacctaaatgattgaaaatgaccgagcatgcagtagaatgtagtgaagtttcctatttcatccattttttgcataagtgcattggtatctgtatatccatctgcccaagcaccagttgttgaaaagactattatttccccatgaatggtcctggtacccttgtcaaagaacagttgaccataaatataagactttctggattctcagtcttactccattgccctatatgtctgtcgttataccagcaccgcactgtcttgatggctgtagcttggtagtaagtttagatttgggatgtgcaagtcctccattttttttttttttttccccaaaatcattttgtctgttttgggtcccttgcattgcatatgaatttttatatgatcattgtgtcaattcctgcaaaacagctgggatcttgatagggatttagttgaattggtagataaatttgagaaataactgctattttaatggtgttaggttttctgttccatgactgtgggatgtctttgcatttgcttaggtctttatttcagtgatgttttagagatttcagtgtgcaagtcttgacgtctttaatttttttctaagtattttactgatgccactttaattatatgattattttctaatttttatttttgtattcatcactggtgttagaaataaaattaatttttgtatattgattttgtatattgtagcttttctaaaattctttttttgtcacttagtattttttgcatatgagatcatgcatctgtgaacagaaatacttttacttcttcctttccagtctagattcctattatttcattttcttgccttagtgtgctggctagcacctccagtacaatattggatagaagtgacaagagcagacatctttttcttgttcctgattttaaggggaaagcattcagtctttcaccattgagtatgatgttagctagctgtgggtttgcttcaagttgaggaaattcttttattaaacctagtttactgagtgttttttaatcaaaaaaaaaaaaaggaggggctgtgggttttgttaaatgcttcttctgtatcaagattttcatgttgttttgtcctttattaatatgttgtattaatggacttttgtatattgaattaactttgcattcctgggataatctcagttgtccatgctacataaaccttgttctatgctgctgga

SEQ ID NO: 113 - DNA, 8768 bp, Homo sapiens
  source 1..8768: mol_type = genomic DNA
agtcctcccgtcttgcgccgcggccgcgagatccgtgtgtctcccaagatggtggcgctgggctcggggtgactacaggagacgacggggccttttcccttcgccaggacccgacacaccaggcttcgctcgctcgcgcacccctccgccgcgtagccatccgccagcgcgggcgcccgccatccgccgcctacttacgcttcacctctgccgacccggcgcgctcggctgcgggcggcggcgcctccttcggctcctcctcggaatagctcgcggcctgtagcccctggcaggagggcccctcagccccccggtgtggacaggcagcggcggctggcgacgaacgccgggatttcggcggccccggcgctccctttcccggcctcgttttccggataaggaagcgcgggtcccgcatgagccccggcggtggcggcagcgaaagagaacgaggcggtggcgggcggaggcggcgggcgagggcgactacgaccagtgaggcggccgccgcagcccaggcgcgggggcgacgacaggttaaaaatctgtaagagcctgattttagaattcaccagctcctcagaagtttggcgaaatatgagttattaagcctacgctcagatcaaggtagcagctagactggtgtgacaacctgtttttaatcagtgactcaaagctgtgatcaccctgatgtcaccgaatggccacagcttgtaaaagtgccagcaggtttattttttgttttgcaagccagctctgcctccttacagtatgacatctgatgctggagggtcgcactttcaaaaatgagtcagctggtacatggggttatcatcaatttttagctcttctgtctgggagatacaagtttggaagcaatcttggggtacttacccacaaggctggtggagaccagatcaggagaacctcagtctgacgacattgaagctagccgaatgaagcgagcagctgcaaagcatctaatagaacgctactaccaccagttaactgagggctgtggaaatgaagcctgcacgaatgagttttgtgcttcctgtccaacttttcttcgtatggataataatgcagcagctattaaagccctcgagctttataagattaatgcaaaactctgtgatcctcatccctccaagaaaggagcaagctcagcttaccttgagaactcgaaaggtgcccccaacaactcctgctctgagataaaaatgaacaagaaaggcgctagaattgattttaaagatgtgacttacttaacagaagagaaggtatatgaaattcttgaattatgtagagaaagagaggattattcccctttaatccgtgttattggaagagttttttctagtgctgaggcattggtacagagcttccggaaagttaaacaacacaccaaggaagaactgaaatctcttcaagcaaaagatgaagacaaagatgaagatgaaaaggaaaaagctgcatgttctgctgctgctatggaagaagactcagaagcatcttcctcaaggataggtgatagctcacagggagacaacaatttgcaaaaattaggccctgatgatgtgtctgtggatattgatgccattagaagggtctacaccagattgctctctaatgaaaaaattgaaactgcctttctcaatgcacttgtatatttgtcacctaacgtggaatgtgacttgacgtatcacaatgtatactctcgagatcctaattatctgaatttgttcattatcgtaatggagaatagaaatctccacagtcctgaatatctggaaatggctttgccattattttgcaaagcgatgagcaagctaccccttgcagcccaaggaaaactgatcagactgtggtctaaatacaatgcagaccagattcggagaatgatggagacatttcagcaacttattacttataaagtcataagcaatgaatttaacagtcgaaatctagtgaatgatgatgatgccattgttgctgcttcgaagtgcttgaaaatggtttactatgcaaatgtagtgggaggggaagtggacacaaatcacaatgaagaagatgatgaagagcccatccctgagtccagcgagctgacacttcaggaacttttgggagaagaaagaagaaacaagaaaggtcctcgagtggaccccctggaaactgaacttggtgttaaaaccctggattgtcgaaaaccacttatcccttttgaagagtttattaatgaaccactgaatgaggttctagaaatggataaagattatacttttttcaaagtagaaacagagaacaaattctcttttatgacatgtccctttatattgaatgctgtcacaaagaatttgggattatattatgacaatagaattcgcatgtacagtgaacgaagaatcactgttctctacagcttagttcaaggacagcagttgaatccatatttgagactcaaagttagacgtgaccatatcatagatgatgcacttgtccggctagagatgatcgctatggaaaatcctgcagacttgaagaagcagttgtatgtggaatttgaaggagaacaaggagttgatgagggaggtgtttccaaagaattttttcagctggttgtggaggaaatcttcaatccagatattggtatgttcacatacgatgaatctacaaaattgttttggtttaatccatcttcttttgaaactgagggtcagtttactctgattggcatagtactgggtctggctatttacaataactgtatactggatgtacattttcccatggttgtctacaggaagctaatggggaaaaaaggaacttttcgtgacttgggagactctcacccagttctatatcagagtttaaaagatttattggagtatgaagggaatgtggaagatgacatgatgatcactttccagatatcacagacagatctttttggtaacccaatgatgtatgatctaaaggaaaatggtgataaaattccaattacaaatgaaaacaggaagaatctagatttccaagcactagaagaaactacagaatatgacggtggctataccagggactctgttctgattagggagttctgggaaatcgttcattcatttacagatgaacagaaaagactcttcttgcagtttacaacgggcacagacagagcacctgtgggaggactaggaaaattaaagatgattatagccaaaaatggcccagacacagaaaggttacctacatctcatacttgctttaatgtgcttttacttccggaatactcaagcaaagaaaaacttaaagagagattgttgaaggccatcacgtatgccaaaggatttggcatgctgtaaaacaaaacaaaacaaaataaaacaaaaaaaaggaaggaaaaaaaaagaaaaaatttaaaaaattttaaaaatataacgagggataaatttttggtggtgatagtgtcccagtacaaaaaggctgtaagatagtcaaccacagtagtcacctatgtctgtgcctcccttctttattggggacatgtgggctggaacagcagatttcagctacatatatgaacaaatcctttattattattataattatttttttgcgtgaaagtgttacatattctttcacttgtatgtacagagaggtttttctgaatatttattttaagggttaaatcacttttgcttgtgtttattactgcttgaggttgagccttttgagtatttaaaaaatatataccaacagaactactctcccaaggaaaatattgccaccatttgtagaccacgtaaccttcaagtatgtgctacttttttgtccctgtatctaactcaaatcaggaactgtattttttttaatgatttgcttttgaaacttgaagtcttgaaaacagtgtgatgcaattactgctgttctagcccccaaagagttttctgtgcaaaatcttgagaatcaatcaataaagaaagatggaaggaagggagaaattggaatgttttaactgcagccctcagaactttagtaacagcacaacaaattaaaaacaaaaacaactcatgccacagtatgtcgtcttcatgtgtcttgcaatgaactgtttcagtagccaatcctctttcttagtatatgaaaggacagggatttttgttcttgttgttctcgttgttgttttaagtttactggggaaagtgcatttggccaaatgaaatggtagtcaagcctattgcaacaaagttaggaagtttgttgtttgtttattataaacaaaaagcatgtgaaagtgcacttaagatagagtttttattaattacttacttattacctagattttaaatagacaatccaaagtctccccttcgtgttgccatcatcttgttgaatcagccattttatcgaggcacgtgatcagtgttgcaacataatgaaaaagatggctactgtgccttgtgttacttaatcatacagtaagctgacctggaaatgaatgaaactattactcctaagaattacattgtatagccccacagattaaatttaattaattaattcaaaacatgttaaacgttactttcatgtactatggaaaagtacaagtaggtttacattactgatttccagaagtaagtagtttcccctttcctagtcttctgtgtatgtgatgttgttaatttcttttattgcattataaaataaaaggattatgtatttttaactaaggtgagacattgatatatccttttgctacaagctatagctaatgtgctgagcttgtgccttggtgattgattgattgattgactgattgttttaactgattactgtagatcaacctgatgatttgtttgtttgaaattggcaggaaaaatgcagctttcaaatcattggggggagaaaaaggatgtctttcaggattattttaattaatttttttcataattgagacagaactgtttgttatgtaccataatgctaaataaaactgtggcacttttcaccataatttaatttagtggaaaaagaagacaatgctttccatattgtgataaggtaacatggggtttttctgggccagcctttagaacactgttagggtacatacgctaccttgatgaaagggaccttcgtgcaactgtagtcatcttaaaggcttctcatccactgtgcttcttaatgtgtaattaaagtgaggagaaattaaatactctgagggcgttttatataataaattcgtgaagaaatgtgtgctcttcagttctcaagttttattattatggtatttattaaagttctacaattgtaataacgtatccatatgacaagttttaaagtggtaattgaaataggttatcagatatagagttgttcacatcaagtagacttttaacagagtcagaatgaacctacccttaaaattttagagaaaaaaaatcgtcggttgcacagaatagctgctctagcttgcttaattatgccgggcatgttgtcactcctcttacttttgctgccttttcattactatttaatggaatgtccctgaacaataaggaagagcaaaacatagacattttgactacagtggatacttcctctaccccaaatgttatgttataaaagtactttttttgcccaggtactctattatatattttggttttctttgaattagacctcaatctccaggaagctctggagggaaaaaaaggaaccataaactaaagtaactggttttccaaataaatgtaaacttttttaaccttttattattatagaacatttcaaacatacataaaacatgaaaacagcctgcagccaaacttttctggaccttggcagctccagcaaatgagctggtcatcctaaccctggtttcctgagacaactacttttggggatgcttgcttgtatagggagatgatagatagatagatacatatcaaaaagaaacttgaaaaaggcttcgaacagaacttgccgatgttactcatccctcctcggtacagacattctgttagaacagatggttgtaatggggcagcatcactccctattcccattaaaaacatgaccattctgagatttcaggccccttcgaggaatttttctcaagaattccatacaaactgtcagaggaagaaatgtcgtcccaagactagtccctgtgtagtcttgatccctttacctgcttactgtaattttttttctctgactttccgccagtgtctaagggccatctgtacccctcccacccttccatgagccactgtataatccaaaaacacaccttccatttgctccctcacttgtctccttttacctcaacagtgttagtgtgtaaagaattgcctggggagggtagagggttttacaagtacagagtcccaagtcttttctcccctccccgttagtgggttggcatttattaataggcactgcaagattttgatgcaggtgtggggtagatatcactgtgaaaggctactaatgcatggtagtttcaccgaaagtacagtcttcaaggatccttataatctcctcattgccaaaatcagtaacatctataaccttgacaacaccctagcttgggctgttgcttctctggctacttgtttttccatcccagtttacccagattttagatggatactcctccaattctgcttaaagtccttacctgttcttgcccagttccctctagtcaacctcagtcactcccaaagattcttccccaatcccatatcttttgctcagacctctgtctctgggatttctttgttacctcatagtcagtagtcctaaaaacaaaattcttcatcttgcatctctatcgaccgaccattctttgtttctttttaagaaatgtaaccttcaccccaatcatcaaaatctctcattcctcaattgtcacaggttgtcacttctttccccctaaacctctcccatcattccttccttctttatactgcccttacaggtcctgatcctctgactcacccggacattcttagcagctgcctaatttcactccctgactctcatctccctcttccaatccttttcattgtgctagaacactatcttgctaattttaatatcctctgcattcagtgcctccacagattgccccctcactgacctttccaatttggccttgtgttacacactttcctcgctgcattcctacccagcatcttcacttgtcatatttctcaaatactcttcatgaccagatatttaaagtacctcatccatgaagacttcatcaacccccaaagtgcctccaatgcttccgtggtagcacagcataatggggtacatttcttagttgaacagtgaggagtcactgggattcttacagagtgtcttagggtctcctcttgatactctttccacatttcagttaaggaattttcttacatctttttttcttctaataacctttgcctggagtgtaagtaaattcatgatagagactgtcatttttaaaaaaaaaaacaaaccattttgcctttcacatgttattacctccatctttctgttatcttgtcagtgttgccacctaaatgattgaaaatgaccgagcatgcagtagaatgtagtgaagtttcctatttcatccattttttgcataagtgcattggtatctgtatatccatctgcccaagcaccagttgttgaaaagactattatttccccatgaatggtcctggtacccttgtcaaagaacagttgaccataaatataagactttctggattctcagtcttactccattgccctatatgtctgtcgttataccagcaccgcactgtcttgatggctgtagcttggtagtaagtttagatttgggatgtgcaagtcctccattttttttttttttttccccaaaatcattttgtctgttttgggtcccttgcattgcatatgaatttttatatgatcattgtgtcaattcctgcaaaacagctgggatcttgatagggatttagttgaattggtagataaatttgagaaataactgctattttaatggtgttaggttttctgttccatgactgtgggatgtctttgcatttgcttaggtctttatttcagtgatgttttagagatttcagtgtgcaagtcttgacgtctttaatttttttctaagtattttactgatgccactttaattatatgattattttctaatttttatttttgtattcatcactggtgttagaaataaaattaatttttgtatattgattttgtatattgtagcttttctaaaattctttttttgtcacttagtattttttgcatatgagatcatgcatctgtgaacagaaatacttttacttcttcctttccagtctagattcctattatttcattttcttgccttagtgtgctggctagcacctccagtacaatattggatagaagtgacaagagcagacatctttttcttgttcctgattttaaggggaaagcattcagtctttcaccattgagtatgatgttagctagctgtgggtttgcttcaagttgaggaaattcttttattaaacctagtttactgagtgttttttaatcaaaaaaaaaaaaaggaggggctgtgggttttgttaaatgcttcttctgtatcaagattttcatgttgttttgtcctttattaatatgttgtattaatggacttttgtatattgaattaactttgcattcctgggataatctcagttgtccatgctacataaaccttgttctatgctgctgga

SEQ ID NO: 114 - DNA, 8388 bp, Homo sapiens
  source 1..8388: mol_type = genomic DNA
agtcctcccgtcttgcgccgcggccgcgagatccgtgtgtctcccaagatggtggcgctgggctcggggtgactacaggagacgacggggccttttcccttcgccaggacccgacacaccaggcttcgctcgctcgcgcacccctccgccgcgtagccatccgccagcgcgggcgcccgccatccgccgcctacttacgcttcacctctgccgacccggcgcgctcggctgcgggcggcggcgcctccttcggctcctcctcggaatagctcgcggcctgtagcccctggcaggagggcccctcagccccccggtgtggacaggcagcggcggctggcgacgaacgccgggatttcggcggccccggcgctccctttcccggcctcgttttccggataaggaagcgcgggtcccgcatgagccccggcggtggcggcagcgaaagagaacgaggcggtggcgggcggaggcggcgggcgagggcgactacgaccagtgaggcggccgccgcagcccaggcgcgggggcgacgacagatcaggagaacctcagtctgacgacattgaagctagccgaatgaagcgagcagctgcaaagcatctaatagaacgctactaccaccagttaactgagggctgtggaaatgaagcctgcacgaatgagttttgtgcttcctgtccaacttttcttcgtatggataataatgcagcagctattaaagccctcgagctttataagattaatgcaaaactctgtgatcctcatccctccaagaaaggagcaagctcagcttaccttgagaactcgaaaggtgcccccaacaactcctgctctgagataaaaatgaacaagaaaggcgctagaattgattttaaagatgtgacttacttaacagaagagaaggtatatgaaattcttgaattatgtagagaaagagaggattattcccctttaatccgtgttattggaagagttttttctagtgctgaggcattggtacagagcttccggaaagttaaacaacacaccaaggaagaactgaaatctcttcaagcaaaagatgaagacaaagatgaagatgaaaaggaaaaagctgcatgttctgctgctgctatggaagaagactcagaagcatcttcctcaaggataggtgatagctcacagggagacaacaatttgcaaaaattaggccctgatgatgtgtctgtggatattgatgccattagaagggtctacaccagattgctctctaatgaaaaaattgaaactgcctttctcaatgcacttgtatatttgtcacctaacgtggaatgtgacttgacgtatcacaatgtatactctcgagatcctaattatctgaatttgttcattatcgtaatggagaatagaaatctccacagtcctgaatatctggaaatggctttgccattattttgcaaagcgatgagcaagctaccccttgcagcccaaggaaaactgatcagactgtggtctaaatacaatgcagaccagattcggagaatgatggagacatttcagcaacttattacttataaagtcataagcaatgaatttaacagtcgaaatctagtgaatgatgatgatgccattgttgctgcttcgaagtgcttgaaaatggtttactatgcaaatgtagtgggaggggaagtggacacaaatcacaatgaagaagatgatgaagagcccatccctgagtccagcgagctgacacttcaggaacttttgggagaagaaagaagaaacaagaaaggtcctcgagtggaccccctggaaactgaacttggtgttaaaaccctggattgtcgaaaaccacttatcccttttgaagagtttattaatgaaccactgaatgaggttctagaaatggataaagattatacttttttcaaagtagaaacagagaacaaattctcttttatgacatgtccctttatattgaatgctgtcacaaagaatttgggattatattatgacaatagaattcgcatgtacagtgaacgaagaatcactgttctctacagcttagttcaaggacagcagttgaatccatatttgagactcaaagttagacgtgaccatatcatagatgatgcacttgtccggctagagatgatcgctatggaaaatcctgcagacttgaagaagcagttgtatgtggaatttgaaggagaacaaggagttgatgagggaggtgtttccaaagaattttttcagctggttgtggaggaaatcttcaatccagatattggtatgttcacatacgatgaatctacaaaattgttttggtttaatccatcttcttttgaaactgagggtcagtttactctgattggcatagtactgggtctggctatttacaataactgtatactggatgtacattttcccatggttgtctacaggaagctaatggggaaaaaaggaacttttcgtgacttgggagactctcacccagttctatatcagagtttaaaagatttattggagtatgaagggaatgtggaagatgacatgatgatcactttccagatatcacagacagatctttttggtaacccaatgatgtatgatctaaaggaaaatggtgataaaattccaattacaaatgaaaacaggaagaatctagatttccaagcactagaagaaactacagaatatgacggtggctataccagggactctgttctgattagggagttctgggaaatcgttcattcatttacagatgaacagaaaagactcttcttgcagtttacaacgggcacagacagagcacctgtgggaggactaggaaaattaaagatgattatagccaaaaatggcccagacacagaaaggttacctacatctcatacttgctttaatgtgcttttacttccggaatactcaagcaaagaaaaacttaaagagagattgttgaaggccatcacgtatgccaaaggatttggcatgctgtaaaacaaaacaaaacaaaataaaacaaaaaaaaggaaggaaaaaaaaagaaaaaatttaaaaaattttaaaaatataacgagggataaatttttggtggtgatagtgtcccagtacaaaaaggctgtaagatagtcaaccacagtagtcacctatgtctgtgcctcccttctttattggggacatgtgggctggaacagcagatttcagctacatatatgaacaaatcctttattattattataattatttttttgcgtgaaagtgttacatattctttcacttgtatgtacagagaggtttttctgaatatttattttaagggttaaatcacttttgcttgtgtttattactgcttgaggttgagccttttgagtatttaaaaaatatataccaacagaactactctcccaaggaaaatattgccaccatttgtagaccacgtaaccttcaagtatgtgctacttttttgtccctgtatctaactcaaatcaggaactgtattttttttaatgatttgcttttgaaacttgaagtcttgaaaacagtgtgatgcaattactgctgttctagcccccaaagagttttctgtgcaaaatcttgagaatcaatcaataaagaaagatggaaggaagggagaaattggaatgttttaactgcagccctcagaactttagtaacagcacaacaaattaaaaacaaaaacaactcatgccacagtatgtcgtcttcatgtgtcttgcaatgaactgtttcagtagccaatcctctttcttagtatatgaaaggacagggatttttgttcttgttgttctcgttgttgttttaagtttactggggaaagtgcatttggccaaatgaaatggtagtcaagcctattgcaacaaagttaggaagtttgttgtttgtttattataaacaaaaagcatgtgaaagtgcacttaagatagagtttttattaattacttacttattacctagattttaaatagacaatccaaagtctccccttcgtgttgccatcatcttgttgaatcagccattttatcgaggcacgtgatcagtgttgcaacataatgaaaaagatggctactgtgccttgtgttacttaatcatacagtaagctgacctggaaatgaatgaaactattactcctaagaattacattgtatagccccacagattaaatttaattaattaattcaaaacatgttaaacgttactttcatgtactatggaaaagtacaagtaggtttacattactgatttccagaagtaagtagtttcccctttcctagtcttctgtgtatgtgatgttgttaatttcttttattgcattataaaataaaaggattatgtatttttaactaaggtgagacattgatatatccttttgctacaagctatagctaatgtgctgagcttgtgccttggtgattgattgattgattgactgattgttttaactgattactgtagatcaacctgatgatttgtttgtttgaaattggcaggaaaaatgcagctttcaaatcattggggggagaaaaaggatgtctttcaggattattttaattaatttttttcataattgagacagaactgtttgttatgtaccataatgctaaataaaactgtggcacttttcaccataatttaatttagtggaaaaagaagacaatgctttccatattgtgataaggtaacatggggtttttctgggccagcctttagaacactgttagggtacatacgctaccttgatgaaagggaccttcgtgcaactgtagtcatcttaaaggcttctcatccactgtgcttcttaatgtgtaattaaagtgaggagaaattaaatactctgagggcgttttatataataaattcgtgaagaaatgtgtgctcttcagttctcaagttttattattatggtatttattaaagttctacaattgtaataacgtatccatatgacaagttttaaagtggtaattgaaataggttatcagatatagagttgttcacatcaagtagacttttaacagagtcagaatgaacctacccttaaaattttagagaaaaaaaatcgtcggttgcacagaatagctgctctagcttgcttaattatgccgggcatgttgtcactcctcttacttttgctgccttttcattactatttaatggaatgtccctgaacaataaggaagagcaaaacatagacattttgactacagtggatacttcctctaccccaaatgttatgttataaaagtactttttttgcccaggtactctattatatattttggttttctttgaattagacctcaatctccaggaagctctggagggaaaaaaaggaaccataaactaaagtaactggttttccaaataaatgtaaacttttttaaccttttattattatagaacatttcaaacatacataaaacatgaaaacagcctgcagccaaacttttctggaccttggcagctccagcaaatgagctggtcatcctaaccctggtttcctgagacaactacttttggggatgcttgcttgtatagggagatgatagatagatagatacatatcaaaaagaaacttgaaaaaggcttcgaacagaacttgccgatgttactcatccctcctcggtacagacattctgttagaacagatggttgtaatggggcagcatcactccctattcccattaaaaacatgaccattctgagatttcaggccccttcgaggaatttttctcaagaattccatacaaactgtcagaggaagaaatgtcgtcccaagactagtccctgtgtagtcttgatccctttacctgcttactgtaattttttttctctgactttccgccagtgtctaagggccatctgtacccctcccacccttccatgagccactgtataatccaaaaacacaccttccatttgctccctcacttgtctccttttacctcaacagtgttagtgtgtaaagaattgcctggggagggtagagggttttacaagtacagagtcccaagtcttttctcccctccccgttagtgggttggcatttattaataggcactgcaagattttgatgcaggtgtggggtagatatcactgtgaaaggctactaatgcatggtagtttcaccgaaagtacagtcttcaaggatccttataatctcctcattgccaaaatcagtaacatctataaccttgacaacaccctagcttgggctgttgcttctctggctacttgtttttccatcccagtttacccagattttagatggatactcctccaattctgcttaaagtccttacctgttcttgcccagttccctctagtcaacctcagtcactcccaaagattcttccccaatcccatatcttttgctcagacctctgtctctgggatttctttgttacctcatagtcagtagtcctaaaaacaaaattcttcatcttgcatctctatcgaccgaccattctttgtttctttttaagaaatgtaaccttcaccccaatcatcaaaatctctcattcctcaattgtcacaggttgtcacttctttccccctaaacctctcccatcattccttccttctttatactgcccttacaggtcctgatcctctgactcacccggacattcttagcagctgcctaatttcactccctgactctcatctccctcttccaatccttttcattgtgctagaacactatcttgctaattttaatatcctctgcattcagtgcctccacagattgccccctcactgacctttccaatttggccttgtgttacacactttcctcgctgcattcctacccagcatcttcacttgtcatatttctcaaatactcttcatgaccagatatttaaagtacctcatccatgaagacttcatcaacccccaaagtgcctccaatgcttccgtggtagcacagcataatggggtacatttcttagttgaacagtgaggagtcactgggattcttacagagtgtcttagggtctcctcttgatactctttccacatttcagttaaggaattttcttacatctttttttcttctaataacctttgcctggagtgtaagtaaattcatgatagagactgtcatttttaaaaaaaaaaacaaaccattttgcctttcacatgttattacctccatctttctgttatcttgtcagtgttgccacctaaatgattgaaaatgaccgagcatgcagtagaatgtagtgaagtttcctatttcatccattttttgcataagtgcattggtatctgtatatccatctgcccaagcaccagttgttgaaaagactattatttccccatgaatggtcctggtacccttgtcaaagaacagttgaccataaatataagactttctggattctcagtcttactccattgccctatatgtctgtcgttataccagcaccgcactgtcttgatggctgtagcttggtagtaagtttagatttgggatgtgcaagtcctccattttttttttttttttccccaaaatcattttgtctgttttgggtcccttgcattgcatatgaatttttatatgatcattgtgtcaattcctgcaaaacagctgggatcttgatagggatttagttgaattggtagataaatttgagaaataactgctattttaatggtgttaggttttctgttccatgactgtgggatgtctttgcatttgcttaggtctttatttcagtgatgttttagagatttcagtgtgcaagtcttgacgtctttaatttttttctaagtattttactgatgccactttaattatatgattattttctaatttttatttttgtattcatcactggtgttagaaataaaattaatttttgtatattgattttgtatattgtagcttttctaaaattctttttttgtcacttagtattttttgcatatgagatcatgcatctgtgaacagaaatacttttacttcttcctttccagtctagattcctattatttcattttcttgccttagtgtgctggctagcacctccagtacaatattggatagaagtgacaagagcagacatctttttcttgttcctgattttaaggggaaagcattcagtctttcaccattgagtatgatgttagctagctgtgggtttgcttcaagttgaggaaattcttttattaaacctagtttactgagtgttttttaatcaaaaaaaaaaaaaggaggggctgtgggttttgttaaatgcttcttctgtatcaagattttcatgttgttttgtcctttattaatatgttgtattaatggacttttgtatattgaattaactttgcattcctgggataatctcagttgtccatgctacataaaccttgttctatgctgctgga

SEQ ID NO: 115 - DNA, 8379 bp, Homo sapiens
  source 1..8379: mol_type = genomic DNA
agtcctcccgtcttgcgccgcggccgcgagatccgtgtgtctcccaagatggtggcgctgggctcggggtgactacaggagacgacggggccttttcccttcgccaggacccgacacaccaggcttcgctcgctcgcgcacccctccgccgcgtagccatccgccagcgcgggcgcccgccatccgccgcctacttacgcttcacctctgccgacccggcgcgctcggctgcgggcggcggcgcctccttcggctcctcctcggaatagctcgcggcctgtagcccctggcaggagggcccctcagccccccggtgtggacaggcagcggcggctggcgacgaacgccgggatttcggcggccccggcgctccctttcccggcctcgttttccggataaggaagcgcgggtcccgcatgagccccggcggtggcggcagcgaaagagaacgaggcggtggcgggcggaggcggcgggcgagggcgactacgaccagtgaggcggccgccgcagcccaggcgcgggggcgacgacagatcaggagaacctcagtctgacgacattgaagctagccgaatgaagcgagcagctgcaaagcatctaatagaacgctactaccaccagttaactgagggctgtggaaatgaagcctgcacgaatgagttttgtgcttcctgtccaacttttcttcgtatggataataatgcagcagctattaaagccctcgagctttataagattaatgcaaaactctgtgatcctcatccctccaagaaaggagcaagctcagcttaccttgagaactcgaaaggtgcccccaacaactcctgctctgagataaaaatgaacaagaaaggcgctagaattgattttaaagatgtgacttacttaacagaagagaaggtatatgaaattcttgaattatgtagagaaagagaggattattcccctttaatccgtgttattggaagagttttttctagtgctgaggcattggtacagagcttccggaaagttaaacaacacaccaaggaagaactgaaatctcttcaagcaaaagatgaagacaaagatgaagatgaaaaggaaaaagctgcatgttctgctgctgctatggaagaagactcagaagcatcttcctcaaggataggtgatagctcacagggagacaacaatttgcaaaaattaggccctgatgatgtgtctgtggatattgatgccattagaagggtctacaccagattgctctctaatgaaaaaattgaaactgcctttctcaatgcacttgtatatttgtcacctaacgtggaatgtgacttgacgtatcacaatgtatactctcgagatcctaattatctgaatttgttcattatcgtaatggagaatagaaatctccacagtcctgaatatctggaaatggctttgccattattttgcaaagcgatgagcaagctaccccttgcagcccaaggaaaactgatcagactgtggtctaaatacaatgcagaccagattcggagaatgatggagacatttcagcaacttattacttataaagtcataagcaatgaatttaacagtcgaaatctagtgaatgatgatgatgccattgttgctgcttcgaagtgcttgaaaatggtttactatgcaaatgtagtgggaggggaagtggacacaaatcacaatgaagaagatgatgaagagcccatccctgagtccagcgagctgacacttcaggaacttttgggagaagaaagaagaaacaagaaaggtcctcgagtggaccccctggaaactgaacttggtgttaaaaccctggattgtcgaaaaccacttatcccttttgaagagtttattaatgaaccactgaatgaggttctagaaatggataaagattatacttttttcaaagtagaaacagagaacaaattctcttttatgacatgtccctttatattgaatgctgtcacaaagaatttgggattatattatgacaatagaattcgcatgtacagtgaacgaagaatcactgttctctacagcttagttcaaggacagcagttgaatccatatttgagactcaaagttagacgtgaccatatcatagatgatgcacttgtccggctagagatgatcgctatggaaaatcctgcagacttgaagaagcagttgtatgtggaatttgaaggagaacaaggagttgatgagggaggtgtttccaaagaattttttcagctggttgtggaggaaatcttcaatccagatattggtatgttcacatacgatgaatctacaaaattgttttggtttaatccatcttcttttgaaactgagggtcagtttactctgattggcatagtactgggtctggctatttacaataactgtatactggatgtacattttcccatggttgtctacaggaagctaatggggaaaaaaggaacttttcgtgacttgggagactctcacccagaatttgtcaatctttattctgactacattctcaataaatcagtagaaaaacagttcaaggcttttcggagaggttttcatatggtgaccaatgaatctcccttaaagtacttattcagaccagaagaaattgaattgcttatatgtggaagccggaatctagatttccaagcactagaagaaactacagaatatgacggtggctataccagggactctgttctgattagggagttctgggaaatcgttcattcatttacagatgaacagaaaagactcttcttgcagtttacaacgggcacagacagagcacctgtgggaggactaggaaaattaaagatgattatagccaaaaatggcccagacacagaaaggttacctacatctcatacttgctttaatgtgcttttacttccggaatactcaagcaaagaaaaacttaaagagagattgttgaaggccatcacgtatgccaaaggatttggcatgctgtaaaacaaaacaaaacaaaataaaacaaaaaaaaggaaggaaaaaaaaagaaaaaatttaaaaaattttaaaaatataacgagggataaatttttggtggtgatagtgtcccagtacaaaaaggctgtaagatagtcaaccacagtagtcacctatgtctgtgcctcccttctttattggggacatgtgggctggaacagcagatttcagctacatatatgaacaaatcctttattattattataattatttttttgcgtgaaagtgttacatattctttcacttgtatgtacagagaggtttttctgaatatttattttaagggttaaatcacttttgcttgtgtttattactgcttgaggttgagccttttgagtatttaaaaaatatataccaacagaactactctcccaaggaaaatattgccaccatttgtagaccacgtaaccttcaagtatgtgctacttttttgtccctgtatctaactcaaatcaggaactgtattttttttaatgatttgcttttgaaacttgaagtcttgaaaacagtgtgatgcaattactgctgttctagcccccaaagagttttctgtgcaaaatcttgagaatcaatcaataaagaaagatggaaggaagggagaaattggaatgttttaactgcagccctcagaactttagtaacagcacaacaaattaaaaacaaaaacaactcatgccacagtatgtcgtcttcatgtgtcttgcaatgaactgtttcagtagccaatcctctttcttagtatatgaaaggacagggatttttgttcttgttgttctcgttgttgttttaagtttactggggaaagtgcatttggccaaatgaaatggtagtcaagcctattgcaacaaagttaggaagtttgttgtttgtttattataaacaaaaagcatgtgaaagtgcacttaagatagagtttttattaattacttacttattacctagattttaaatagacaatccaaagtctccccttcgtgttgccatcatcttgttgaatcagccattttatcgaggcacgtgatcagtgttgcaacataatgaaaaagatggctactgtgccttgtgttacttaatcatacagtaagctgacctggaaatgaatgaaactattactcctaagaattacattgtatagccccacagattaaatttaattaattaattcaaaacatgttaaacgttactttcatgtactatggaaaagtacaagtaggtttacattactgatttccagaagtaagtagtttcccctttcctagtcttctgtgtatgtgatgttgttaatttcttttattgcattataaaataaaaggattatgtatttttaactaaggtgagacattgatatatccttttgctacaagctatagctaatgtgctgagcttgtgccttggtgattgattgattgattgactgattgttttaactgattactgtagatcaacctgatgatttgtttgtttgaaattggcaggaaaaatgcagctttcaaatcattggggggagaaaaaggatgtctttcaggattattttaattaatttttttcataattgagacagaactgtttgttatgtaccataatgctaaataaaactgtggcacttttcaccataatttaatttagtggaaaaagaagacaatgctttccatattgtgataaggtaacatggggtttttctgggccagcctttagaacactgttagggtacatacgctaccttgatgaaagggaccttcgtgcaactgtagtcatcttaaaggcttctcatccactgtgcttcttaatgtgtaattaaagtgaggagaaattaaatactctgagggcgttttatataataaattcgtgaagaaatgtgtgctcttcagttctcaagttttattattatggtatttattaaagttctacaattgtaataacgtatccatatgacaagttttaaagtggtaattgaaataggttatcagatatagagttgttcacatcaagtagacttttaacagagtcagaatgaacctacccttaaaattttagagaaaaaaaatcgtcggttgcacagaatagctgctctagcttgcttaattatgccgggcatgttgtcactcctcttacttttgctgccttttcattactatttaatggaatgtccctgaacaataaggaagagcaaaacatagacattttgactacagtggatacttcctctaccccaaatgttatgttataaaagtactttttttgcccaggtactctattatatattttggttttctttgaattagacctcaatctccaggaagctctggagggaaaaaaaggaaccataaactaaagtaactggttttccaaataaatgtaaacttttttaaccttttattattatagaacatttcaaacatacataaaacatgaaaacagcctgcagccaaacttttctggaccttggcagctccagcaaatgagctggtcatcctaaccctggtttcctgagacaactacttttggggatgcttgcttgtatagggagatgatagatagatagatacatatcaaaaagaaacttgaaaaaggcttcgaacagaacttgccgatgttactcatccctcctcggtacagacattctgttagaacagatggttgtaatggggcagcatcactccctattcccattaaaaacatgaccattctgagatttcaggccccttcgaggaatttttctcaagaattccatacaaactgtcagaggaagaaatgtcgtcccaagactagtccctgtgtagtcttgatccctttacctgcttactgtaattttttttctctgactttccgccagtgtctaagggccatctgtacccctcccacccttccatgagccactgtataatccaaaaacacaccttccatttgctccctcacttgtctccttttacctcaacagtgttagtgtgtaaagaattgcctggggagggtagagggttttacaagtacagagtcccaagtcttttctcccctccccgttagtgggttggcatttattaataggcactgcaagattttgatgcaggtgtggggtagatatcactgtgaaaggctactaatgcatggtagtttcaccgaaagtacagtcttcaaggatccttataatctcctcattgccaaaatcagtaacatctataaccttgacaacaccctagcttgggctgttgcttctctggctacttgtttttccatcccagtttacccagattttagatggatactcctccaattctgcttaaagtccttacctgttcttgcccagttccctctagtcaacctcagtcactcccaaagattcttccccaatcccatatcttttgctcagacctctgtctctgggatttctttgttacctcatagtcagtagtcctaaaaacaaaattcttcatcttgcatctctatcgaccgaccattctttgtttctttttaagaaatgtaaccttcaccccaatcatcaaaatctctcattcctcaattgtcacaggttgtcacttctttccccctaaacctctcccatcattccttccttctttatactgcccttacaggtcctgatcctctgactcacccggacattcttagcagctgcctaatttcactccctgactctcatctccctcttccaatccttttcattgtgctagaacactatcttgctaattttaatatcctctgcattcagtgcctccacagattgccccctcactgacctttccaatttggccttgtgttacacactttcctcgctgcattcctacccagcatcttcacttgtcatatttctcaaatactcttcatgaccagatatttaaagtacctcatccatgaagacttcatcaacccccaaagtgcctccaatgcttccgtggtagcacagcataatggggtacatttcttagttgaacagtgaggagtcactgggattcttacagagtgtcttagggtctcctcttgatactctttccacatttcagttaaggaattttcttacatctttttttcttctaataacctttgcctggagtgtaagtaaattcatgatagagactgtcatttttaaaaaaaaaaacaaaccattttgcctttcacatgttattacctccatctttctgttatcttgtcagtgttgccacctaaatgattgaaaatgaccgagcatgcagtagaatgtagtgaagtttcctatttcatccattttttgcataagtgcattggtatctgtatatccatctgcccaagcaccagttgttgaaaagactattatttccccatgaatggtcctggtacccttgtcaaagaacagttgaccataaatataagactttctggattctcagtcttactccattgccctatatgtctgtcgttataccagcaccgcactgtcttgatggctgtagcttggtagtaagtttagatttgggatgtgcaagtcctccattttttttttttttttccccaaaatcattttgtctgttttgggtcccttgcattgcatatgaatttttatatgatcattgtgtcaattcctgcaaaacagctgggatcttgatagggatttagttgaattggtagataaatttgagaaataactgctattttaatggtgttaggttttctgttccatgactgtgggatgtctttgcatttgcttaggtctttatttcagtgatgttttagagatttcagtgtgcaagtcttgacgtctttaatttttttctaagtattttactgatgccactttaattatatgattattttctaatttttatttttgtattcatcactggtgttagaaataaaattaatttttgtatattgattttgtatattgtagcttttctaaaattctttttttgtcacttagtattttttgcatatgagatcatgcatctgtgaacagaaatacttttacttcttcctttccagtctagattcctattatttcattttcttgccttagtgtgctggctagcacctccagtacaatattggatagaagtgacaagagcagacatctttttcttgttcctgattttaaggggaaagcattcagtctttcaccattgagtatgatgttagctagctgtgggtttgcttcaagttgaggaaattcttttattaaacctagtttactgagtgttttttaatcaaaaaaaaaaaaaggaggggctgtgggttttgttaaatgcttcttctgtatcaagattttcatgttgttttgtcctttattaatatgttgtattaatggacttttgtatattgaattaactttgcattcctgggataatctcagttgtccatgctacataaaccttgttctatgctgctgga

SEQ ID NO: 116 - DNA, 7477 bp, Homo sapiens
  source 1..7477: mol_type = genomic DNA
agtcctcccgtcttgcgccgcggccgcgagatccgtgtgtctcccaagatggtggcgctgggctcggggtgactacaggagacgacggggccttttcccttcgccaggacccgacacaccaggcttcgctcgctcgcgcacccctccgccgcgtagccatccgccagcgcgggcgcccgccatccgccgcctacttacgcttcacctctgccgacccggcgcgctcggctgcgggcggcggcgcctccttcggctcctcctcggaatagctcgcggcctgtagcccctggcaggagggcccctcagccccccggtgtggacaggcagcggcggctggcgacgaacgccgggatttcggcggccccggcgctccctttcccggcctcgttttccggataaggaagcgcgggtcccgcatgagccccggcggtggcggcagcgaaagagaacgaggcggtggcgggcggaggcggcgggcgagggcgactacgaccagtgaggcggccgccgcagcccaggcgcgggggcgacgacaggttaaaaatctgtaagagcctgattttagaattcaccagctcctcagaagtttggcgaaatatgagttattaagcctacgctcagatcaaggtagcagctagactggtgtgacaacctgtttttaatcagtgactcaaagctgtgatcaccctgatgtcaccgaatggccacagcttgtaaaagatcaggagaacctcagtctgacgacattgaagctagccgaatgaagcgagcagctgcaaagcatctaatagaacgctactaccaccagttaactgagggctgtggaaatgaagcctgcacgaatgagttttgtgcttcctgtccaacttttcttcgtatggataataatgcagcagctattaaagccctcgagctttataagattaatgcaaaactctgtgatcctcatccctccaagaaaggagcaagctcagcttaccttgagaactcgaaaggtgcccccaacaactcctgctctgagataaaaatgaacaagaaaggcgctagaattgattttaaagagatgatcgctatggaaaatcctgcagacttgaagaagcagttgtatgtggaatttgaaggagaacaaggagttgatgagggaggtgtttccaaagaattttttcagctggttgtggaggaaatcttcaatccagatattggtatgttcacatacgatgaatctacaaaattgttttggtttaatccatcttcttttgaaactgagggtcagtttactctgattggcatagtactgggtctggctatttacaataactgtatactggatgtacattttcccatggttgtctacaggaagctaatggggaaaaaaggaacttttcgtgacttgggagactctcacccagttctatatcagagtttaaaagatttattggagtatgaagggaatgtggaagatgacatgatgatcactttccagatatcacagacagatctttttggtaacccaatgatgtatgatctaaaggaaaatggtgataaaattccaattacaaatgaaaacaggaaggaatttgtcaatctttattctgactacattctcaataaatcagtagaaaaacagttcaaggcttttcggagaggttttcatatggtgaccaatgaatctcccttaaagtacttattcagaccagaagaaattgaattgcttatatgtggaagccggaatctagatttccaagcactagaagaaactacagaatatgacggtggctataccagggactctgttctgattagggagttctgggaaatcgttcattcatttacagatgaacagaaaagactcttcttgcagtttacaacgggcacagacagagcacctgtgggaggactaggaaaattaaagatgattatagccaaaaatggcccagacacagaaaggttacctacatctcatacttgctttaatgtgcttttacttccggaatactcaagcaaagaaaaacttaaagagagattgttgaaggccatcacgtatgccaaaggatttggcatgctgtaaaacaaaacaaaacaaaataaaacaaaaaaaaggaaggaaaaaaaaagaaaaaatttaaaaaattttaaaaatataacgagggataaatttttggtggtgatagtgtcccagtacaaaaaggctgtaagatagtcaaccacagtagtcacctatgtctgtgcctcccttctttattggggacatgtgggctggaacagcagatttcagctacatatatgaacaaatcctttattattattataattatttttttgcgtgaaagtgttacatattctttcacttgtatgtacagagaggtttttctgaatatttattttaagggttaaatcacttttgcttgtgtttattactgcttgaggttgagccttttgagtatttaaaaaatatataccaacagaactactctcccaaggaaaatattgccaccatttgtagaccacgtaaccttcaagtatgtgctacttttttgtccctgtatctaactcaaatcaggaactgtattttttttaatgatttgcttttgaaacttgaagtcttgaaaacagtgtgatgcaattactgctgttctagcccccaaagagttttctgtgcaaaatcttgagaatcaatcaataaagaaagatggaaggaagggagaaattggaatgttttaactgcagccctcagaactttagtaacagcacaacaaattaaaaacaaaaacaactcatgccacagtatgtcgtcttcatgtgtcttgcaatgaactgtttcagtagccaatcctctttcttagtatatgaaaggacagggatttttgttcttgttgttctcgttgttgttttaagtttactggggaaagtgcatttggccaaatgaaatggtagtcaagcctattgcaacaaagttaggaagtttgttgtttgtttattataaacaaaaagcatgtgaaagtgcacttaagatagagtttttattaattacttacttattacctagattttaaatagacaatccaaagtctccccttcgtgttgccatcatcttgttgaatcagccattttatcgaggcacgtgatcagtgttgcaacataatgaaaaagatggctactgtgccttgtgttacttaatcatacagtaagctgacctggaaatgaatgaaactattactcctaagaattacattgtatagccccacagattaaatttaattaattaattcaaaacatgttaaacgttactttcatgtactatggaaaagtacaagtaggtttacattactgatttccagaagtaagtagtttcccctttcctagtcttctgtgtatgtgatgttgttaatttcttttattgcattataaaataaaaggattatgtatttttaactaaggtgagacattgatatatccttttgctacaagctatagctaatgtgctgagcttgtgccttggtgattgattgattgattgactgattgttttaactgattactgtagatcaacctgatgatttgtttgtttgaaattggcaggaaaaatgcagctttcaaatcattggggggagaaaaaggatgtctttcaggattattttaattaatttttttcataattgagacagaactgtttgttatgtaccataatgctaaataaaactgtggcacttttcaccataatttaatttagtggaaaaagaagacaatgctttccatattgtgataaggtaacatggggtttttctgggccagcctttagaacactgttagggtacatacgctaccttgatgaaagggaccttcgtgcaactgtagtcatcttaaaggcttctcatccactgtgcttcttaatgtgtaattaaagtgaggagaaattaaatactctgagggcgttttatataataaattcgtgaagaaatgtgtgctcttcagttctcaagttttattattatggtatttattaaagttctacaattgtaataacgtatccatatgacaagttttaaagtggtaattgaaataggttatcagatatagagttgttcacatcaagtagacttttaacagagtcagaatgaacctacccttaaaattttagagaaaaaaaatcgtcggttgcacagaatagctgctctagcttgcttaattatgccgggcatgttgtcactcctcttacttttgctgccttttcattactatttaatggaatgtccctgaacaataaggaagagcaaaacatagacattttgactacagtggatacttcctctaccccaaatgttatgttataaaagtactttttttgcccaggtactctattatatattttggttttctttgaattagacctcaatctccaggaagctctggagggaaaaaaaggaaccataaactaaagtaactggttttccaaataaatgtaaacttttttaaccttttattattatagaacatttcaaacatacataaaacatgaaaacagcctgcagccaaacttttctggaccttggcagctccagcaaatgagctggtcatcctaaccctggtttcctgagacaactacttttggggatgcttgcttgtatagggagatgatagatagatagatacatatcaaaaagaaacttgaaaaaggcttcgaacagaacttgccgatgttactcatccctcctcggtacagacattctgttagaacagatggttgtaatggggcagcatcactccctattcccattaaaaacatgaccattctgagatttcaggccccttcgaggaatttttctcaagaattccatacaaactgtcagaggaagaaatgtcgtcccaagactagtccctgtgtagtcttgatccctttacctgcttactgtaattttttttctctgactttccgccagtgtctaagggccatctgtacccctcccacccttccatgagccactgtataatccaaaaacacaccttccatttgctccctcacttgtctccttttacctcaacagtgttagtgtgtaaagaattgcctggggagggtagagggttttacaagtacagagtcccaagtcttttctcccctccccgttagtgggttggcatttattaataggcactgcaagattttgatgcaggtgtggggtagatatcactgtgaaaggctactaatgcatggtagtttcaccgaaagtacagtcttcaaggatccttataatctcctcattgccaaaatcagtaacatctataaccttgacaacaccctagcttgggctgttgcttctctggctacttgtttttccatcccagtttacccagattttagatggatactcctccaattctgcttaaagtccttacctgttcttgcccagttccctctagtcaacctcagtcactcccaaagattcttccccaatcccatatcttttgctcagacctctgtctctgggatttctttgttacctcatagtcagtagtcctaaaaacaaaattcttcatcttgcatctctatcgaccgaccattctttgtttctttttaagaaatgtaaccttcaccccaatcatcaaaatctctcattcctcaattgtcacaggttgtcacttctttccccctaaacctctcccatcattccttccttctttatactgcccttacaggtcctgatcctctgactcacccggacattcttagcagctgcctaatttcactccctgactctcatctccctcttccaatccttttcattgtgctagaacactatcttgctaattttaatatcctctgcattcagtgcctccacagattgccccctcactgacctttccaatttggccttgtgttacacactttcctcgctgcattcctacccagcatcttcacttgtcatatttctcaaatactcttcatgaccagatatttaaagtacctcatccatgaagacttcatcaacccccaaagtgcctccaatgcttccgtggtagcacagcataatggggtacatttcttagttgaacagtgaggagtcactgggattcttacagagtgtcttagggtctcctcttgatactctttccacatttcagttaaggaattttcttacatctttttttcttctaataacctttgcctggagtgtaagtaaattcatgatagagactgtcatttttaaaaaaaaaaacaaaccattttgcctttcacatgttattacctccatctttctgttatcttgtcagtgttgccacctaaatgattgaaaatgaccgagcatgcagtagaatgtagtgaagtttcctatttcatccattttttgcataagtgcattggtatctgtatatccatctgcccaagcaccagttgttgaaaagactattatttccccatgaatggtcctggtacccttgtcaaagaacagttgaccataaatataagactttctggattctcagtcttactccattgccctatatgtctgtcgttataccagcaccgcactgtcttgatggctgtagcttggtagtaagtttagatttgggatgtgcaagtcctccattttttttttttttttccccaaaatcattttgtctgttttgggtcccttgcattgcatatgaatttttatatgatcattgtgtcaattcctgcaaaacagctgggatcttgatagggatttagttgaattggtagataaatttgagaaataactgctattttaatggtgttaggttttctgttccatgactgtgggatgtctttgcatttgcttaggtctttatttcagtgatgttttagagatttcagtgtgcaagtcttgacgtctttaatttttttctaagtattttactgatgccactttaattatatgattattttctaatttttatttttgtattcatcactggtgttagaaataaaattaatttttgtatattgattttgtatattgtagcttttctaaaattctttttttgtcacttagtattttttgcatatgagatcatgcatctgtgaacagaaatacttttacttcttcctttccagtctagattcctattatttcattttcttgccttagtgtgctggctagcacctccagtacaatattggatagaagtgacaagagcagacatctttttcttgttcctgattttaaggggaaagcattcagtctttcaccattgagtatgatgttagctagctgtgggtttgcttcaagttgaggaaattcttttattaaacctagtttactgagtgttttttaatcaaaaaaaaaaaaaggaggggctgtgggttttgttaaatgcttcttctgtatcaagattttcatgttgttttgtcctttattaatatgttgtattaatggacttttgtatattgaattaactttgcattcctgggataatctcagttgtccatgctacataaaccttgttctatgctgctgga

SEQ ID NO: 117 - DNA, 7293 bp, Homo sapiens
  source 1..7293: mol_type = genomic DNA
agtcctcccgtcttgcgccgcggccgcgagatccgtgtgtctcccaagatggtggcgctgggctcggggtgactacaggagacgacggggccttttcccttcgccaggacccgacacaccaggcttcgctcgctcgcgcacccctccgccgcgtagccatccgccagcgcgggcgcccgccatccgccgcctacttacgcttcacctctgccgacccggcgcgctcggctgcgggcggcggcgcctccttcggctcctcctcggaatagctcgcggcctgtagcccctggcaggagggcccctcagccccccggtgtggacaggcagcggcggctggcgacgaacgccgggatttcggcggccccggcgctccctttcccggcctcgttttccggataaggaagcgcgggtcccgcatgagccccggcggtggcggcagcgaaagagaacgaggcggtggcgggcggaggcggcgggcgagggcgactacgaccagtgaggcggccgccgcagcccaggcgcgggggcgacgacagatcaggagaacctcagtctgacgacattgaagctagccgaatgaagcgagcagctgcaaagcatctaatagaacgctactaccaccagttaactgagggctgtggaaatgaagcctgcacgaatgagttttgtgcttcctgtccaacttttcttcgtatggataataatgcagcagctattaaagccctcgagctttataagattaatgcaaaactctgtgatcctcatccctccaagaaaggagcaagctcagcttaccttgagaactcgaaaggtgcccccaacaactcctgctctgagataaaaatgaacaagaaaggcgctagaattgattttaaagagatgatcgctatggaaaatcctgcagacttgaagaagcagttgtatgtggaatttgaaggagaacaaggagttgatgagggaggtgtttccaaagaattttttcagctggttgtggaggaaatcttcaatccagatattggtatgttcacatacgatgaatctacaaaattgttttggtttaatccatcttcttttgaaactgagggtcagtttactctgattggcatagtactgggtctggctatttacaataactgtatactggatgtacattttcccatggttgtctacaggaagctaatggggaaaaaaggaacttttcgtgacttgggagactctcacccagttctatatcagagtttaaaagatttattggagtatgaagggaatgtggaagatgacatgatgatcactttccagatatcacagacagatctttttggtaacccaatgatgtatgatctaaaggaaaatggtgataaaattccaattacaaatgaaaacaggaaggaatttgtcaatctttattctgactacattctcaataaatcagtagaaaaacagttcaaggcttttcggagaggttttcatatggtgaccaatgaatctcccttaaagtacttattcagaccagaagaaattgaattgcttatatgtggaagccggaatctagatttccaagcactagaagaaactacagaatatgacggtggctataccagggactctgttctgattagggagttctgggaaatcgttcattcatttacagatgaacagaaaagactcttcttgcagtttacaacgggcacagacagagcacctgtgggaggactaggaaaattaaagatgattatagccaaaaatggcccagacacagaaaggttacctacatctcatacttgctttaatgtgcttttacttccggaatactcaagcaaagaaaaacttaaagagagattgttgaaggccatcacgtatgccaaaggatttggcatgctgtaaaacaaaacaaaacaaaataaaacaaaaaaaaggaaggaaaaaaaaagaaaaaatttaaaaaattttaaaaatataacgagggataaatttttggtggtgatagtgtcccagtacaaaaaggctgtaagatagtcaaccacagtagtcacctatgtctgtgcctcccttctttattggggacatgtgggctggaacagcagatttcagctacatatatgaacaaatcctttattattattataattatttttttgcgtgaaagtgttacatattctttcacttgtatgtacagagaggtttttctgaatatttattttaagggttaaatcacttttgcttgtgtttattactgcttgaggttgagccttttgagtatttaaaaaatatataccaacagaactactctcccaaggaaaatattgccaccatttgtagaccacgtaaccttcaagtatgtgctacttttttgtccctgtatctaactcaaatcaggaactgtattttttttaatgatttgcttttgaaacttgaagtcttgaaaacagtgtgatgcaattactgctgttctagcccccaaagagttttctgtgcaaaatcttgagaatcaatcaataaagaaagatggaaggaagggagaaattggaatgttttaactgcagccctcagaactttagtaacagcacaacaaattaaaaacaaaaacaactcatgccacagtatgtcgtcttcatgtgtcttgcaatgaactgtttcagtagccaatcctctttcttagtatatgaaaggacagggatttttgttcttgttgttctcgttgttgttttaagtttactggggaaagtgcatttggccaaatgaaatggtagtcaagcctattgcaacaaagttaggaagtttgttgtttgtttattataaacaaaaagcatgtgaaagtgcacttaagatagagtttttattaattacttacttattacctagattttaaatagacaatccaaagtctccccttcgtgttgccatcatcttgttgaatcagccattttatcgaggcacgtgatcagtgttgcaacataatgaaaaagatggctactgtgccttgtgttacttaatcatacagtaagctgacctggaaatgaatgaaactattactcctaagaattacattgtatagccccacagattaaatttaattaattaattcaaaacatgttaaacgttactttcatgtactatggaaaagtacaagtaggtttacattactgatttccagaagtaagtagtttcccctttcctagtcttctgtgtatgtgatgttgttaatttcttttattgcattataaaataaaaggattatgtatttttaactaaggtgagacattgatatatccttttgctacaagctatagctaatgtgctgagcttgtgccttggtgattgattgattgattgactgattgttttaactgattactgtagatcaacctgatgatttgtttgtttgaaattggcaggaaaaatgcagctttcaaatcattggggggagaaaaaggatgtctttcaggattattttaattaatttttttcataattgagacagaactgtttgttatgtaccataatgctaaataaaactgtggcacttttcaccataatttaatttagtggaaaaagaagacaatgctttccatattgtgataaggtaacatggggtttttctgggccagcctttagaacactgttagggtacatacgctaccttgatgaaagggaccttcgtgcaactgtagtcatcttaaaggcttctcatccactgtgcttcttaatgtgtaattaaagtgaggagaaattaaatactctgagggcgttttatataataaattcgtgaagaaatgtgtgctcttcagttctcaagttttattattatggtatttattaaagttctacaattgtaataacgtatccatatgacaagttttaaagtggtaattgaaataggttatcagatatagagttgttcacatcaagtagacttttaacagagtcagaatgaacctacccttaaaattttagagaaaaaaaatcgtcggttgcacagaatagctgctctagcttgcttaattatgccgggcatgttgtcactcctcttacttttgctgccttttcattactatttaatggaatgtccctgaacaataaggaagagcaaaacatagacattttgactacagtggatacttcctctaccccaaatgttatgttataaaagtactttttttgcccaggtactctattatatattttggttttctttgaattagacctcaatctccaggaagctctggagggaaaaaaaggaaccataaactaaagtaactggttttccaaataaatgtaaacttttttaaccttttattattatagaacatttcaaacatacataaaacatgaaaacagcctgcagccaaacttttctggaccttggcagctccagcaaatgagctggtcatcctaaccctggtttcctgagacaactacttttggggatgcttgcttgtatagggagatgatagatagatagatacatatcaaaaagaaacttgaaaaaggcttcgaacagaacttgccgatgttactcatccctcctcggtacagacattctgttagaacagatggttgtaatggggcagcatcactccctattcccattaaaaacatgaccattctgagatttcaggccccttcgaggaatttttctcaagaattccatacaaactgtcagaggaagaaatgtcgtcccaagactagtccctgtgtagtcttgatccctttacctgcttactgtaattttttttctctgactttccgccagtgtctaagggccatctgtacccctcccacccttccatgagccactgtataatccaaaaacacaccttccatttgctccctcacttgtctccttttacctcaacagtgttagtgtgtaaagaattgcctggggagggtagagggttttacaagtacagagtcccaagtcttttctcccctccccgttagtgggttggcatttattaataggcactgcaagattttgatgcaggtgtggggtagatatcactgtgaaaggctactaatgcatggtagtttcaccgaaagtacagtcttcaaggatccttataatctcctcattgccaaaatcagtaacatctataaccttgacaacaccctagcttgggctgttgcttctctggctacttgtttttccatcccagtttacccagattttagatggatactcctccaattctgcttaaagtccttacctgttcttgcccagttccctctagtcaacctcagtcactcccaaagattcttccccaatcccatatcttttgctcagacctctgtctctgggatttctttgttacctcatagtcagtagtcctaaaaacaaaattcttcatcttgcatctctatcgaccgaccattctttgtttctttttaagaaatgtaaccttcaccccaatcatcaaaatctctcattcctcaattgtcacaggttgtcacttctttccccctaaacctctcccatcattccttccttctttatactgcccttacaggtcctgatcctctgactcacccggacattcttagcagctgcctaatttcactccctgactctcatctccctcttccaatccttttcattgtgctagaacactatcttgctaattttaatatcctctgcattcagtgcctccacagattgccccctcactgacctttccaatttggccttgtgttacacactttcctcgctgcattcctacccagcatcttcacttgtcatatttctcaaatactcttcatgaccagatatttaaagtacctcatccatgaagacttcatcaacccccaaagtgcctccaatgcttccgtggtagcacagcataatggggtacatttcttagttgaacagtgaggagtcactgggattcttacagagtgtcttagggtctcctcttgatactctttccacatttcagttaaggaattttcttacatctttttttcttctaataacctttgcctggagtgtaagtaaattcatgatagagactgtcatttttaaaaaaaaaaacaaaccattttgcctttcacatgttattacctccatctttctgttatcttgtcagtgttgccacctaaatgattgaaaatgaccgagcatgcagtagaatgtagtgaagtttcctatttcatccattttttgcataagtgcattggtatctgtatatccatctgcccaagcaccagttgttgaaaagactattatttccccatgaatggtcctggtacccttgtcaaagaacagttgaccataaatataagactttctggattctcagtcttactccattgccctatatgtctgtcgttataccagcaccgcactgtcttgatggctgtagcttggtagtaagtttagatttgggatgtgcaagtcctccattttttttttttttttccccaaaatcattttgtctgttttgggtcccttgcattgcatatgaatttttatatgatcattgtgtcaattcctgcaaaacagctgggatcttgatagggatttagttgaattggtagataaatttgagaaataactgctattttaatggtgttaggttttctgttccatgactgtgggatgtctttgcatttgcttaggtctttatttcagtgatgttttagagatttcagtgtgcaagtcttgacgtctttaatttttttctaagtattttactgatgccactttaattatatgattattttctaatttttatttttgtattcatcactggtgttagaaataaaattaatttttgtatattgattttgtatattgtagcttttctaaaattctttttttgtcacttagtattttttgcatatgagatcatgcatctgtgaacagaaatacttttacttcttcctttccagtctagattcctattatttcattttcttgccttagtgtgctggctagcacctccagtacaatattggatagaagtgacaagagcagacatctttttcttgttcctgattttaaggggaaagcattcagtctttcaccattgagtatgatgttagctagctgtgggtttgcttcaagttgaggaaattcttttattaaacctagtttactgagtgttttttaatcaaaaaaaaaaaaaggaggggctgtgggttttgttaaatgcttcttctgtatcaagattttcatgttgttttgtcctttattaatatgttgtattaatggacttttgtatattgaattaactttgcattcctgggataatctcagttgtccatgctacataaaccttgttctatgctgctgga

SEQ ID NO: 118 - DNA, 7249 bp, Homo sapiens
  source 1..7249: mol_type = genomic DNA
agtcctcccgtcttgcgccgcggccgcgagatccgtgtgtctcccaagatggtggcgctgggctcggggtgactacaggagacgacggggccttttcccttcgccaggacccgacacaccaggcttcgctcgctcgcgcacccctccgccgcgtagccatccgccagcgcgggcgcccgccatccgccgcctacttacgcttcacctctgccgacccggcgcgctcggctgcgggcggcggcgcctccttcggctcctcctcggaatagctcgcggcctgtagcccctggcaggagggcccctcagccccccggtgtggacaggcagcggcggctggcgacgaacgccgggatttcggcggccccggcgctccctttcccggcctcgttttccggataaggaagcgcgggtcccgcatgagccccggcggtggcggcagcgaaagagaacgaggcggtggcgggcggaggcggcgggcgagggcgactacgaccagtgaggcggccgccgcagcccaggcgcgggggcgacgacaggttaaaaatctgtaagagcctgattttagaattcaccagctcctcagaagtttggcgaaatatgagttattaagcctacgctcagatcaaggtagcagctagactggtgtgacaacctgtttttaatcagtgactcaaagctgtgatcaccctgatgtcaccgaatggccacagcttgtaaaaggtaattttgaattattttacagcctttaaaaggctgtcattgtaaagtgaaatacatactgtaaaaatgaagacaatgtatagttggcaggaatactgctaagaatagtgggcctgagagttgacctacttcatttaatctccttaaaatattttagtgtctttttttctcattaaaaatatcagtagccactatcaaagacctatctgtatgtataaacaggaaagtatttctcaaaaaaacttcaaggttttaaacattttactataaacattatagaaaacattaaaaatttcttaatatgcattttaaagtatgccttttatgtggtgaacgttttaactaaacatttctctagaagtttttataacattaataaaactagtatacttttctctcctagagagttacagtggaggtaaaaggagtggcttgcaggatggagaagctgcaccagtgttattggaagtgagccaccatttgaatttgctagctcatgctgcagtattcagattagtgggtgttttgtgatcatattttctgcgattcaaatcaagacctaaaattgattctcattctgagatttacattttattatccaatgttatttggttattgtttcagttttaaaatttctgacttgttattctgacacactttaggataacctaagtcaatagtttaatacaaaaatttccctttggttatatgttttgaattaggttatatgttctgcatttacaagcacatacaggattcttacttccagcaacttggcagtaaaagaataagtagactctttaggagccaaagtcaagcttgggaactgttgctaggtggtatatatttcatagtttatgtttgtttccaagacaaggtctcactccatcgcccaggctggagtgcagtggcacgatcacagttcactgcaactttgaccttctgggctcaagtgaccctcccacctcagcctcccaagttgctgggactaaaggcacccaccaccacacccggctaagagacgaggtttcatcatgttgcccaggttgaccttgaactcctgagctcaagtggtccttatgtcttgacctcccaaagtgctgagattacagacatgaactaccacacctggcatatgtcatagttttgagagtttgaattctaacctcgggactttggtaacttatttataatattctagaaatatactgttattaggatgagtagaaattcattcagacagaaactattataaattactgcaagaaaaatgtctgctagttctgcatatattcatttttctcttgattaaaaaacaatttccaatttgagtagaacaactttgctatgtttaatagacccaggacagatttattttaaggtaataatctttcaatccttcttcttctatactggattggtttaaattacttagcttgtcttatcaatggtttttaatagcctactttaatatatgtaaaaagtagtaattaatatgttacagtttggtggcaaacattttgatgccaaagttcacatattctcttgcttagggaacagaaattgggaagatagatgtagttatcatttgataatgtatttaaactctatcccatttcaggatctcaaaactttgtaacagttacatattgtacttctaagacttagatttgtttttcttcttgtgtcttacctttttgcagtaatatttttattttcctatcatcatgtcctcattttttccctctcttctctttccctgttaattttgaaagttttgctgcctacgtgtttgaaaacttctaatctgcctctcttccctcagtgccagcaggtttattttttgttttgcaagccagctctgcctccttacagtatgacatctgatgctggagggtcgcactttcaaaaatgagtcagctggtacatggggttatcatcaatttttagctcttctgtctgggagatacaagtttggaagcaatcttggggtacttacccacaaggctggtggagaccagatcaggagaacctcagtctgacgacattgaagctagccgaatgaagcgagcagctgcaaagcatctaatagaacgctactaccaccagttaactgagggctgtggaaatgaagcctgcacgaatgagttttgtgcttcctgtccaacttttcttcgtatggataataatgcagcagctattaaagccctcgagctttataagattaatgcaaaactctgtgatcctcatccctccaagaaaggagcaagctcagcttaccttgagaactcgaaaggtgcccccaacaactcctgctctgagataaaaatgaacaagaaaggcgctagaattgattttaaagatgtgacttacttaacagaagagaaggtatatgaaattcttgaattatgtagagaaagagaggattattcccctttaatccgtgttattggaagagttttttctagtgctgaggcattggtacagagcttccggaaagttaaacaacacaccaaggaagaactgaaatctcttcaagcaaaagatgaagacaaagatgaagatgaaaaggaaaaagctgcatgttctgctgctgctatggaagaagactcagaagcatcttcctcaaggataggtgatagctcacagggagacaacaatttgcaaaaattaggccctgatgatgtgtctgtggatattgatgccattagaagggtctacaccagattgctctctaatgaaaaaattgaaactgcctttctcaatgcacttgtatatttgtcacctaacgtggaatgtgacttgacgtatcacaatgtatactctcgagatcctaattatctgaatttgttcattatcgtaatggagaatagaaatctccacagtcctgaatatctggaaatggctttgccattattttgcaaagcgatgagcaagctaccccttgcagcccaaggaaaactgatcagactgtggtctaaatacaatgcagaccagattcggagaatgatggagacatttcagcaacttattacttataaagtcataagcaatgaatttaacagtcgaaatctagtgaatgatgatgatgccattgttgctgcttcgaagtgcttgaaaatggtttactatgcaaatgtagtgggaggggaagtggacacaaatcacaatgaagaagatgatgaagagcccatccctgagtccagcgagctgacacttcaggaacttttgggagaagaaagaagaaacaagaaaggtcctcgagtggaccccctggaaactgaacttggtgttaaaaccctggattgtcgaaaaccacttatcccttttgaagagtttattaatgaaccactgaatgaggttctagaaatggataaagattatacttttttcaaagtagaaacagagaacaaattctcttttatgacatgtccctttatattgaatgctgtcacaaagaatttgggattatattatgacaatagaattcgcatgtacagtgaacgaagaatcactgttctctacagcttagttcaaggacagcagttgaatccatatttgagactcaaagttagacgtgaccatatcatagatgatgcacttgtccggctagagatgatcgctatggaaaatcctgcagacttgaagaagcagttgtatgtggaatttgaaggagaacaaggagttgatgagggaggtgtttccaaagaattttttcagctggttgtggaggaaatcttcaatccagatattggtatgttcacatacgatgaatctacaaaattgttttggtttaatccatcttcttttgaaactgagggtcagtttactctgattggcatagtactgggtctggctatttacaataactgtatactggatgtacattttcccatggttgtctacaggaagctaatggggaaaaaaggaacttttcgtgacttgggagactctcacccagttctatatcagagtttaaaagatttattggagtatgaagggaatgtggaagatgacatgatgatcactttccagatatcacagacagatctttttggtaacccaatgatgtatgatctaaaggaaaatggtgataaaattccaattacaaatgaaaacaggaaggaatttgtcaatctttattctgactacattctcaataaatcagtagaaaaacagttcaaggcttttcggagaggttttcatatggtgaccaatgaatctcccttaaagtacttattcagaccagaagaaattgaattgcttatatgtggaagccggaatctagatttccaagcactagaagaaactacagaatatgacggtggctataccagggactctgttctgattagggagttctgggaaatcgttcattcatttacagatgaacagaaaagactcttcttgcagtttacaacgggcacagacagagcacctgtgggaggactaggaaaattaaagatgattatagccaaaaatggcccagacacagaaaggttacctacatctcatacttgctttaatgtgcttttacttccggaatactcaagcaaagaaaaacttaaagagagattgttgaaggccatcacgtatgccaaaggatttggcatgctgtaaaacaaaacaaaacaaaataaaacaaaaaaaaggaaggaaaaaaaaagaaaaaatttaaaaaattttaaaaatataacgagggataaatttttggtggtgatagtgtcccagtacaaaaaggctgtaagatagtcaaccacagtagtcacctatgtctgtgcctcccttctttattggggacatgtgggctggaacagcagatttcagctacatatatgaacaaatcctttattattattataattatttttttgcgtgaaagtgttacatattctttcacttgtatgtacagagaggtttttctgaatatttattttaagggttaaatcacttttgcttgtgtttattactgcttgaggttgagccttttgagtatttaaaaaatatataccaacagaactactctcccaaggaaaatattgccaccatttgtagaccacgtaaccttcaagtatgtgctacttttttgtccctgtatctaactcaaatcaggaactgtattttttttaatgatttgcttttgaaacttgaagtcttgaaaacagtgtgatgcaattactgctgttctagcccccaaagagttttctgtgcaaaatcttgagaatcaatcaataaagaaagatggaaggaagggagaaattggaatgttttaactgcagccctcagaactttagtaacagcacaacaaattaaaaacaaaaacaactcatgccacagtatgtcgtcttcatgtgtcttgcaatgaactgtttcagtagccaatcctctttcttagtatatgaaaggacagggatttttgttcttgttgttctcgttgttgttttaagtttactggggaaagtgcatttggccaaatgaaatggtagtcaagcctattgcaacaaagttaggaagtttgttgtttgtttattataaacaaaaagcatgtgaaagtgcacttaagatagagtttttattaattacttacttattacctagattttaaatagacaatccaaagtctccccttcgtgttgccatcatcttgttgaatcagccattttatcgaggcacgtgatcagtgttgcaacataatgaaaaagatggctactgtgccttgtgttacttaatcatacagtaagctgacctggaaatgaatgaaactattactcctaagaattacattgtatagccccacagattaaatttaattaattaattcaaaacatgttaaacgttactttcatgtactatggaaaagtacaagtaggtttacattactgatttccagaagtaagtagtttcccctttcctagtcttctgtgtatgtgatgttgttaatttcttttattgcattataaaataaaaggattatgtatttttaactaaggtgagacattgatatatccttttgctacaagctatagctaatgtgctgagcttgtgccttggtgattgattgattgattgactgattgttttaactgattactgtagatcaacctgatgatttgtttgtttgaaattggcaggaaaaatgcagctttcaaatcattggggggagaaaaaggatgtctttcaggattattttaattaatttttttcataattgagacagaactgtttgttatgtaccataatgctaaataaaactgtggcacttttcaccataatttaatttagtggaaaaagaagacaatgctttccatattgtgataaggtaacatggggtttttctgggccagcctttagaacactgttagggtacatacgctaccttgatgaaagggaccttcgtgcaactgtagtcatcttaaaggcttctcatccactgtgcttcttaatgtgtaattaaagtgaggagaaattaaatactctgagggcgttttatataataaattcgtgaagaaatgtgtgctcttcagttctc

SEQ ID NO: 119 - DNA, 8544 bp, Homo sapiens
  source 1..8544: mol_type = genomic DNA
agtcctcccgtcttgcgccgcggccgcgagatccgtgtgtctcccaagatggtggcgctgggctcggggtgactacaggagacgacggggccttttcccttcgccaggacccgacacaccaggcttcgctcgctcgcgcacccctccgccgcgtagccatccgccagcgcgggcgcccgccatccgccgcctacttacgcttcacctctgccgacccggcgcgctcggctgcgggcggcggcgcctccttcggctcctcctcggaatagctcgcggcctgtagcccctggcaggagggcccctcagccccccggtgtggacaggcagcggcggctggcgacgaacgccgggatttcggcggccccggcgctccctttcccggcctcgttttccggataaggaagcgcgggtcccgcatgagccccggcggtggcggcagcgaaagagaacgaggcggtggcgggcggaggcggcgggcgagggcgactacgaccagtgaggcggccgccgcagcccaggcgcgggggcgacgacagatcaggagaacctcagtctgacgacattgaagctagccgaatgaagcgagcagctgcaaagcatctaatagaacgctactaccaccagttaactgagggctgtggaaatgaagcctgcacgaatgagttttgtgcttcctgtccaacttttcttcgtatggataataatgcagcagctattaaagccctcgagctttataagattaatgcaaaactctgtgatcctcatccctccaagaaaggagcaagctcagcttaccttgagaactcgaaaggtgcccccaacaactcctgctctgagataaaaatgaacaagaaaggcgctagaattgattttaaagatgtgacttacttaacagaagagaaggtatatgaaattcttgaattatgtagagaaagagaggattattcccctttaatccgtgttattggaagagttttttctagtgctgaggcattggtacagagcttccggaaagttaaacaacacaccaaggaagaactgaaatctcttcaagcaaaagatgaagacaaagatgaagatgaaaaggaaaaagctgcatgttctgctgctgctatggaagaagactcagaagcatcttcctcaaggataggtgatagctcacagggagacaacaatttgcaaaaattaggccctgatgatgtgtctgtggatattgatgccattagaagggtctacaccagattgctctctaatgaaaaaattgaaactgcctttctcaatgcacttgtatatttgtcacctaacgtggaatgtgacttgacgtatcacaatgtatactctcgagatcctaattatctgaatttgttcattatcgtaatggagaatagaaatctccacagtcctgaatatctggaaatggctttgccattattttgcaaagcgatgagcaagctaccccttgcagcccaaggaaaactgatcagactgtggtctaaatacaatgcagaccagattcggagaatgatggagacatttcagcaacttattacttataaagtcataagcaatgaatttaacagtcgaaatctagtgaatgatgatgatgccattgttgctgcttcgaagtgcttgaaaatggtttactatgcaaatgtagtgggaggggaagtggacacaaatcacaatgaagaagatgatgaagagcccatccctgagtccagcgagctgacacttcaggaacttttgggagaagaaagaagaaacaagaaaggtcctcgagtggaccccctggaaactgaacttggtgttaaaaccctggattgtcgaaaaccacttatcccttttgaagagtttattaatgaaccactgaatgaggttctagaaatggataaagattatacttttttcaaagtagaaacagagaacaaattctcttttatgacatgtccctttatattgaatgctgtcacaaagaatttgggattatattatgacaatagaattcgcatgtacagtgaacgaagaatcactgttctctacagcttagttcaaggacagcagttgaatccatatttgagactcaaagttagacgtgaccatatcatagatgatgcacttgtccggctagagatgatcgctatggaaaatcctgcagacttgaagaagcagttgtatgtggaatttgaaggagaacaaggagttgatgagggaggtgtttccaaagaattttttcagctggttgtggaggaaatcttcaatccagatattggtatgttcacatacgatgaatctacaaaattgttttggtttaatccatcttcttttgaaactgagggtcagtttactctgattggcatagtactgggtctggctatttacaataactgtatactggatgtacattttcccatggttgtctacaggaagctaatggggaaaaaaggaacttttcgtgacttgggagactctcacccagttctatatcagagtttaaaagatttattggagtatgaagggaatgtggaagatgacatgatgatcactttccagatatcacagacagatctttttggtaacccaatgatgtatgatctaaaggaaaatggtgataaaattccaattacaaatgaaaacaggaaggaatttgtcaatctttattctgactacattctcaataaatcagtagaaaaacagttcaaggcttttcggagaggttttcatatggtgaccaatgaatctcccttaaagtacttattcagaccagaagaaattgaattgcttatatgtggaagccggaatctagatttccaagcactagaagaaactacagaatatgacggtggctataccagggactctgttctgattagggagttctgggaaatcgttcattcatttacagatgaacagaaaagactcttcttgcagtttacaacgggcacagacagagcacctgtgggaggactaggaaaattaaagatgattatagccaaaaatggcccagacacagaaaggttacctacatctcatacttgctttaatgtgcttttacttccggaatactcaagcaaagaaaaacttaaagagagattgttgaaggccatcacgtatgccaaaggatttggcatgctgtaaaacaaaacaaaacaaaataaaacaaaaaaaaggaaggaaaaaaaaagaaaaaatttaaaaaattttaaaaatataacgagggataaatttttggtggtgatagtgtcccagtacaaaaaggctgtaagatagtcaaccacagtagtcacctatgtctgtgcctcccttctttattggggacatgtgggctggaacagcagatttcagctacatatatgaacaaatcctttattattattataattatttttttgcgtgaaagtgttacatattctttcacttgtatgtacagagaggtttttctgaatatttattttaagggttaaatcacttttgcttgtgtttattactgcttgaggttgagccttttgagtatttaaaaaatatataccaacagaactactctcccaaggaaaatattgccaccatttgtagaccacgtaaccttcaagtatgtgctacttttttgtccctgtatctaactcaaatcaggaactgtattttttttaatgatttgcttttgaaacttgaagtcttgaaaacagtgtgatgcaattactgctgttctagcccccaaagagttttctgtgcaaaatcttgagaatcaatcaataaagaaagatggaaggaagggagaaattggaatgttttaactgcagccctcagaactttagtaacagcacaacaaattaaaaacaaaaacaactcatgccacagtatgtcgtcttcatgtgtcttgcaatgaactgtttcagtagccaatcctctttcttagtatatgaaaggacagggatttttgttcttgttgttctcgttgttgttttaagtttactggggaaagtgcatttggccaaatgaaatggtagtcaagcctattgcaacaaagttaggaagtttgttgtttgtttattataaacaaaaagcatgtgaaagtgcacttaagatagagtttttattaattacttacttattacctagattttaaatagacaatccaaagtctccccttcgtgttgccatcatcttgttgaatcagccattttatcgaggcacgtgatcagtgttgcaacataatgaaaaagatggctactgtgccttgtgttacttaatcatacagtaagctgacctggaaatgaatgaaactattactcctaagaattacattgtatagccccacagattaaatttaattaattaattcaaaacatgttaaacgttactttcatgtactatggaaaagtacaagtaggtttacattactgatttccagaagtaagtagtttcccctttcctagtcttctgtgtatgtgatgttgttaatttcttttattgcattataaaataaaaggattatgtatttttaactaaggtgagacattgatatatccttttgctacaagctatagctaatgtgctgagcttgtgccttggtgattgattgattgattgactgattgttttaactgattactgtagatcaacctgatgatttgtttgtttgaaattggcaggaaaaatgcagctttcaaatcattggggggagaaaaaggatgtctttcaggattattttaattaatttttttcataattgagacagaactgtttgttatgtaccataatgctaaataaaactgtggcacttttcaccataatttaatttagtggaaaaagaagacaatgctttccatattgtgataaggtaacatggggtttttctgggccagcctttagaacactgttagggtacatacgctaccttgatgaaagggaccttcgtgcaactgtagtcatcttaaaggcttctcatccactgtgcttcttaatgtgtaattaaagtgaggagaaattaaatactctgagggcgttttatataataaattcgtgaagaaatgtgtgctcttcagttctcaagttttattattatggtatttattaaagttctacaattgtaataacgtatccatatgacaagttttaaagtggtaattgaaataggttatcagatatagagttgttcacatcaagtagacttttaacagagtcagaatgaacctacccttaaaattttagagaaaaaaaatcgtcggttgcacagaatagctgctctagcttgcttaattatgccgggcatgttgtcactcctcttacttttgctgccttttcattactatttaatggaatgtccctgaacaataaggaagagcaaaacatagacattttgactacagtggatacttcctctaccccaaatgttatgttataaaagtactttttttgcccaggtactctattatatattttggttttctttgaattagacctcaatctccaggaagctctggagggaaaaaaaggaaccataaactaaagtaactggttttccaaataaatgtaaacttttttaaccttttattattatagaacatttcaaacatacataaaacatgaaaacagcctgcagccaaacttttctggaccttggcagctccagcaaatgagctggtcatcctaaccctggtttcctgagacaactacttttggggatgcttgcttgtatagggagatgatagatagatagatacatatcaaaaagaaacttgaaaaaggcttcgaacagaacttgccgatgttactcatccctcctcggtacagacattctgttagaacagatggttgtaatggggcagcatcactccctattcccattaaaaacatgaccattctgagatttcaggccccttcgaggaatttttctcaagaattccatacaaactgtcagaggaagaaatgtcgtcccaagactagtccctgtgtagtcttgatccctttacctgcttactgtaattttttttctctgactttccgccagtgtctaagggccatctgtacccctcccacccttccatgagccactgtataatccaaaaacacaccttccatttgctccctcacttgtctccttttacctcaacagtgttagtgtgtaaagaattgcctggggagggtagagggttttacaagtacagagtcccaagtcttttctcccctccccgttagtgggttggcatttattaataggcactgcaagattttgatgcaggtgtggggtagatatcactgtgaaaggctactaatgcatggtagtttcaccgaaagtacagtcttcaaggatccttataatctcctcattgccaaaatcagtaacatctataaccttgacaacaccctagcttgggctgttgcttctctggctacttgtttttccatcccagtttacccagattttagatggatactcctccaattctgcttaaagtccttacctgttcttgcccagttccctctagtcaacctcagtcactcccaaagattcttccccaatcccatatcttttgctcagacctctgtctctgggatttctttgttacctcatagtcagtagtcctaaaaacaaaattcttcatcttgcatctctatcgaccgaccattctttgtttctttttaagaaatgtaaccttcaccccaatcatcaaaatctctcattcctcaattgtcacaggttgtcacttctttccccctaaacctctcccatcattccttccttctttatactgcccttacaggtcctgatcctctgactcacccggacattcttagcagctgcctaatttcactccctgactctcatctccctcttccaatccttttcattgtgctagaacactatcttgctaattttaatatcctctgcattcagtgcctccacagattgccccctcactgacctttccaatttggccttgtgttacacactttcctcgctgcattcctacccagcatcttcacttgtcatatttctcaaatactcttcatgaccagatatttaaagtacctcatccatgaagacttcatcaacccccaaagtgcctccaatgcttccgtggtagcacagcataatggggtacatttcttagttgaacagtgaggagtcactgggattcttacagagtgtcttagggtctcctcttgatactctttccacatttcagttaaggaattttcttacatctttttttcttctaataacctttgcctggagtgtaagtaaattcatgatagagactgtcatttttaaaaaaaaaaacaaaccattttgcctttcacatgttattacctccatctttctgttatcttgtcagtgttgccacctaaatgattgaaaatgaccgagcatgcagtagaatgtagtgaagtttcctatttcatccattttttgcataagtgcattggtatctgtatatccatctgcccaagcaccagttgttgaaaagactattatttccccatgaatggtcctggtacccttgtcaaagaacagttgaccataaatataagactttctggattctcagtcttactccattgccctatatgtctgtcgttataccagcaccgcactgtcttgatggctgtagcttggtagtaagtttagatttgggatgtgcaagtcctccattttttttttttttttccccaaaatcattttgtctgttttgggtcccttgcattgcatatgaatttttatatgatcattgtgtcaattcctgcaaaacagctgggatcttgatagggatttagttgaattggtagataaatttgagaaataactgctattttaatggtgttaggttttctgttccatgactgtgggatgtctttgcatttgcttaggtctttatttcagtgatgttttagagatttcagtgtgcaagtcttgacgtctttaatttttttctaagtattttactgatgccactttaattatatgattattttctaatttttatttttgtattcatcactggtgttagaaataaaattaatttttgtatattgattttgtatattgtagcttttctaaaattctttttttgtcacttagtattttttgcatatgagatcatgcatctgtgaacagaaatacttttacttcttcctttccagtctagattcctattatttcattttcttgccttagtgtgctggctagcacctccagtacaatattggatagaagtgacaagagcagacatctttttcttgttcctgattttaaggggaaagcattcagtctttcaccattgagtatgatgttagctagctgtgggtttgcttcaagttgaggaaattcttttattaaacctagtttactgagtgttttttaatcaaaaaaaaaaaaaggaggggctgtgggttttgttaaatgcttcttctgtatcaagattttcatgttgttttgtcctttattaatatgttgtattaatggacttttgtatattgaattaactttgcattcctgggataatctcagttgtccatgctacataaaccttgttctatgctgctgga

SEQ ID NO: 120 - DNA, 8728 bp, Homo sapiens
  source 1..8728: mol_type = genomic DNA
agtcctcccgtcttgcgccgcggccgcgagatccgtgtgtctcccaagatggtggcgctgggctcggggtgactacaggagacgacggggccttttcccttcgccaggacccgacacaccaggcttcgctcgctcgcgcacccctccgccgcgtagccatccgccagcgcgggcgcccgccatccgccgcctacttacgcttcacctctgccgacccggcgcgctcggctgcgggcggcggcgcctccttcggctcctcctcggaatagctcgcggcctgtagcccctggcaggagggcccctcagccccccggtgtggacaggcagcggcggctggcgacgaacgccgggatttcggcggccccggcgctccctttcccggcctcgttttccggataaggaagcgcgggtcccgcatgagccccggcggtggcggcagcgaaagagaacgaggcggtggcgggcggaggcggcgggcgagggcgactacgaccagtgaggcggccgccgcagcccaggcgcgggggcgacgacaggttaaaaatctgtaagagcctgattttagaattcaccagctcctcagaagtttggcgaaatatgagttattaagcctacgctcagatcaaggtagcagctagactggtgtgacaacctgtttttaatcagtgactcaaagctgtgatcaccctgatgtcaccgaatggccacagcttgtaaaagatcaggagaacctcagtctgacgacattgaagctagccgaatgaagcgagcagctgcaaagcatctaatagaacgctactaccaccagttaactgagggctgtggaaatgaagcctgcacgaatgagttttgtgcttcctgtccaacttttcttcgtatggataataatgcagcagctattaaagccctcgagctttataagattaatgcaaaactctgtgatcctcatccctccaagaaaggagcaagctcagcttaccttgagaactcgaaaggtgcccccaacaactcctgctctgagataaaaatgaacaagaaaggcgctagaattgattttaaagatgtgacttacttaacagaagagaaggtatatgaaattcttgaattatgtagagaaagagaggattattcccctttaatccgtgttattggaagagttttttctagtgctgaggcattggtacagagcttccggaaagttaaacaacacaccaaggaagaactgaaatctcttcaagcaaaagatgaagacaaagatgaagatgaaaaggaaaaagctgcatgttctgctgctgctatggaagaagactcagaagcatcttcctcaaggataggtgatagctcacagggagacaacaatttgcaaaaattaggccctgatgatgtgtctgtggatattgatgccattagaagggtctacaccagattgctctctaatgaaaaaattgaaactgcctttctcaatgcacttgtatatttgtcacctaacgtggaatgtgacttgacgtatcacaatgtatactctcgagatcctaattatctgaatttgttcattatcgtaatggagaatagaaatctccacagtcctgaatatctggaaatggctttgccattattttgcaaagcgatgagcaagctaccccttgcagcccaaggaaaactgatcagactgtggtctaaatacaatgcagaccagattcggagaatgatggagacatttcagcaacttattacttataaagtcataagcaatgaatttaacagtcgaaatctagtgaatgatgatgatgccattgttgctgcttcgaagtgcttgaaaatggtttactatgcaaatgtagtgggaggggaagtggacacaaatcacaatgaagaagatgatgaagagcccatccctgagtccagcgagctgacacttcaggaacttttgggagaagaaagaagaaacaagaaaggtcctcgagtggaccccctggaaactgaacttggtgttaaaaccctggattgtcgaaaaccacttatcccttttgaagagtttattaatgaaccactgaatgaggttctagaaatggataaagattatacttttttcaaagtagaaacagagaacaaattctcttttatgacatgtccctttatattgaatgctgtcacaaagaatttgggattatattatgacaatagaattcgcatgtacagtgaacgaagaatcactgttctctacagcttagttcaaggacagcagttgaatccatatttgagactcaaagttagacgtgaccatatcatagatgatgcacttgtccggctagagatgatcgctatggaaaatcctgcagacttgaagaagcagttgtatgtggaatttgaaggagaacaaggagttgatgagggaggtgtttccaaagaattttttcagctggttgtggaggaaatcttcaatccagatattggtatgttcacatacgatgaatctacaaaattgttttggtttaatccatcttcttttgaaactgagggtcagtttactctgattggcatagtactgggtctggctatttacaataactgtatactggatgtacattttcccatggttgtctacaggaagctaatggggaaaaaaggaacttttcgtgacttgggagactctcacccagttctatatcagagtttaaaagatttattggagtatgaagggaatgtggaagatgacatgatgatcactttccagatatcacagacagatctttttggtaacccaatgatgtatgatctaaaggaaaatggtgataaaattccaattacaaatgaaaacaggaaggaatttgtcaatctttattctgactacattctcaataaatcagtagaaaaacagttcaaggcttttcggagaggttttcatatggtgaccaatgaatctcccttaaagtacttattcagaccagaagaaattgaattgcttatatgtggaagccggaatctagatttccaagcactagaagaaactacagaatatgacggtggctataccagggactctgttctgattagggagttctgggaaatcgttcattcatttacagatgaacagaaaagactcttcttgcagtttacaacgggcacagacagagcacctgtgggaggactaggaaaattaaagatgattatagccaaaaatggcccagacacagaaaggttacctacatctcatacttgctttaatgtgcttttacttccggaatactcaagcaaagaaaaacttaaagagagattgttgaaggccatcacgtatgccaaaggatttggcatgctgtaaaacaaaacaaaacaaaataaaacaaaaaaaaggaaggaaaaaaaaagaaaaaatttaaaaaattttaaaaatataacgagggataaatttttggtggtgatagtgtcccagtacaaaaaggctgtaagatagtcaaccacagtagtcacctatgtctgtgcctcccttctttattggggacatgtgggctggaacagcagatttcagctacatatatgaacaaatcctttattattattataattatttttttgcgtgaaagtgttacatattctttcacttgtatgtacagagaggtttttctgaatatttattttaagggttaaatcacttttgcttgtgtttattactgcttgaggttgagccttttgagtatttaaaaaatatataccaacagaactactctcccaaggaaaatattgccaccatttgtagaccacgtaaccttcaagtatgtgctacttttttgtccctgtatctaactcaaatcaggaactgtattttttttaatgatttgcttttgaaacttgaagtcttgaaaacagtgtgatgcaattactgctgttctagcccccaaagagttttctgtgcaaaatcttgagaatcaatcaataaagaaagatggaaggaagggagaaattggaatgttttaactgcagccctcagaactttagtaacagcacaacaaattaaaaacaaaaacaactcatgccacagtatgtcgtcttcatgtgtcttgcaatgaactgtttcagtagccaatcctctttcttagtatatgaaaggacagggatttttgttcttgttgttctcgttgttgttttaagtttactggggaaagtgcatttggccaaatgaaatggtagtcaagcctattgcaacaaagttaggaagtttgttgtttgtttattataaacaaaaagcatgtgaaagtgcacttaagatagagtttttattaattacttacttattacctagattttaaatagacaatccaaagtctccccttcgtgttgccatcatcttgttgaatcagccattttatcgaggcacgtgatcagtgttgcaacataatgaaaaagatggctactgtgccttgtgttacttaatcatacagtaagctgacctggaaatgaatgaaactattactcctaagaattacattgtatagccccacagattaaatttaattaattaattcaaaacatgttaaacgttactttcatgtactatggaaaagtacaagtaggtttacattactgatttccagaagtaagtagtttcccctttcctagtcttctgtgtatgtgatgttgttaatttcttttattgcattataaaataaaaggattatgtatttttaactaaggtgagacattgatatatccttttgctacaagctatagctaatgtgctgagcttgtgccttggtgattgattgattgattgactgattgttttaactgattactgtagatcaacctgatgatttgtttgtttgaaattggcaggaaaaatgcagctttcaaatcattggggggagaaaaaggatgtctttcaggattattttaattaatttttttcataattgagacagaactgtttgttatgtaccataatgctaaataaaactgtggcacttttcaccataatttaatttagtggaaaaagaagacaatgctttccatattgtgataaggtaacatggggtttttctgggccagcctttagaacactgttagggtacatacgctaccttgatgaaagggaccttcgtgcaactgtagtcatcttaaaggcttctcatccactgtgcttcttaatgtgtaattaaagtgaggagaaattaaatactctgagggcgttttatataataaattcgtgaagaaatgtgtgctcttcagttctcaagttttattattatggtatttattaaagttctacaattgtaataacgtatccatatgacaagttttaaagtggtaattgaaataggttatcagatatagagttgttcacatcaagtagacttttaacagagtcagaatgaacctacccttaaaattttagagaaaaaaaatcgtcggttgcacagaatagctgctctagcttgcttaattatgccgggcatgttgtcactcctcttacttttgctgccttttcattactatttaatggaatgtccctgaacaataaggaagagcaaaacatagacattttgactacagtggatacttcctctaccccaaatgttatgttataaaagtactttttttgcccaggtactctattatatattttggttttctttgaattagacctcaatctccaggaagctctggagggaaaaaaaggaaccataaactaaagtaactggttttccaaataaatgtaaacttttttaaccttttattattatagaacatttcaaacatacataaaacatgaaaacagcctgcagccaaacttttctggaccttggcagctccagcaaatgagctggtcatcctaaccctggtttcctgagacaactacttttggggatgcttgcttgtatagggagatgatagatagatagatacatatcaaaaagaaacttgaaaaaggcttcgaacagaacttgccgatgttactcatccctcctcggtacagacattctgttagaacagatggttgtaatggggcagcatcactccctattcccattaaaaacatgaccattctgagatttcaggccccttcgaggaatttttctcaagaattccatacaaactgtcagaggaagaaatgtcgtcccaagactagtccctgtgtagtcttgatccctttacctgcttactgtaattttttttctctgactttccgccagtgtctaagggccatctgtacccctcccacccttccatgagccactgtataatccaaaaacacaccttccatttgctccctcacttgtctccttttacctcaacagtgttagtgtgtaaagaattgcctggggagggtagagggttttacaagtacagagtcccaagtcttttctcccctccccgttagtgggttggcatttattaataggcactgcaagattttgatgcaggtgtggggtagatatcactgtgaaaggctactaatgcatggtagtttcaccgaaagtacagtcttcaaggatccttataatctcctcattgccaaaatcagtaacatctataaccttgacaacaccctagcttgggctgttgcttctctggctacttgtttttccatcccagtttacccagattttagatggatactcctccaattctgcttaaagtccttacctgttcttgcccagttccctctagtcaacctcagtcactcccaaagattcttccccaatcccatatcttttgctcagacctctgtctctgggatttctttgttacctcatagtcagtagtcctaaaaacaaaattcttcatcttgcatctctatcgaccgaccattctttgtttctttttaagaaatgtaaccttcaccccaatcatcaaaatctctcattcctcaattgtcacaggttgtcacttctttccccctaaacctctcccatcattccttccttctttatactgcccttacaggtcctgatcctctgactcacccggacattcttagcagctgcctaatttcactccctgactctcatctccctcttccaatccttttcattgtgctagaacactatcttgctaattttaatatcctctgcattcagtgcctccacagattgccccctcactgacctttccaatttggccttgtgttacacactttcctcgctgcattcctacccagcatcttcacttgtcatatttctcaaatactcttcatgaccagatatttaaagtacctcatccatgaagacttcatcaacccccaaagtgcctccaatgcttccgtggtagcacagcataatggggtacatttcttagttgaacagtgaggagtcactgggattcttacagagtgtcttagggtctcctcttgatactctttccacatttcagttaaggaattttcttacatctttttttcttctaataacctttgcctggagtgtaagtaaattcatgatagagactgtcatttttaaaaaaaaaaacaaaccattttgcctttcacatgttattacctccatctttctgttatcttgtcagtgttgccacctaaatgattgaaaatgaccgagcatgcagtagaatgtagtgaagtttcctatttcatccattttttgcataagtgcattggtatctgtatatccatctgcccaagcaccagttgttgaaaagactattatttccccatgaatggtcctggtacccttgtcaaagaacagttgaccataaatataagactttctggattctcagtcttactccattgccctatatgtctgtcgttataccagcaccgcactgtcttgatggctgtagcttggtagtaagtttagatttgggatgtgcaagtcctccattttttttttttttttccccaaaatcattttgtctgttttgggtcccttgcattgcatatgaatttttatatgatcattgtgtcaattcctgcaaaacagctgggatcttgatagggatttagttgaattggtagataaatttgagaaataactgctattttaatggtgttaggttttctgttccatgactgtgggatgtctttgcatttgcttaggtctttatttcagtgatgttttagagatttcagtgtgcaagtcttgacgtctttaatttttttctaagtattttactgatgccactttaattatatgattattttctaatttttatttttgtattcatcactggtgttagaaataaaattaatttttgtatattgattttgtatattgtagcttttctaaaattctttttttgtcacttagtattttttgcatatgagatcatgcatctgtgaacagaaatacttttacttcttcctttccagtctagattcctattatttcattttcttgccttagtgtgctggctagcacctccagtacaatattggatagaagtgacaagagcagacatctttttcttgttcctgattttaaggggaaagcattcagtctttcaccattgagtatgatgttagctagctgtgggtttgcttcaagttgaggaaattcttttattaaacctagtttactgagtgttttttaatcaaaaaaaaaaaaaggaggggctgtgggttttgttaaatgcttcttctgtatcaagattttcatgttgttttgtcctttattaatatgttgtattaatggacttttgtatattgaattaactttgcattcctgggataatctcagttgtccatgctacataaaccttgttctatgctgctgga

SEQ ID NO: 121 - DNA, 8728 bp, Homo sapiens; identical to SEQ ID NO: 120
  source 1..8728: mol_type = genomic DNA

SEQ ID NO: 122 - DNA, 9131 bp, Homo sapiens
  source 1..9131: mol_type = genomic DNA
gtctcccaagatggtggcgctgggctcggggtgactacaggagacgacggggccttttcccttcgccaggacccgacacaccaggcttcgctcgctcgcgcacccctccgccgcgtagccatccgccagcgcgggcgcccgccatccgccgcctacttacgcttcacctctgccgacccggcgcgctcggctgcgggcggcggcgcctccttcggctcctcctcggaatagctcgcggcctgtagcccctggcaggagggcccctcagccccccggtgtggacaggcagcggcggctggcgacgaacgccgggatttcggcggccccggcgctccctttcccggcctcgttttccggataaggaagcgcgggtcccgcatgagccccggcggtggcggcagcgaaagagaacgaggcggtggcgggcggaggcggcgggcgagggcgactacgaccagtgaggcggccgccgcagcccaggcgcgggggcgacgacagagactgccatactgttttccacagtgactgcaccattttacattcccaccagcagtgaataagggttccaatttctctgcatcttttctaacacttgaggggaggtatggtgtcaagaaaacatagtcaccattattacgaaaagtaaaatatggaagagatgatccctaccatcaatcagcttacaactagaggcactgacaaatgtatacagatagctgtaatgtaaggttaaaaatctgtaagagcctgattttagaattcaccagctcctcagaagtttggcgaaatatgagttattaagcctacgctcagatcaaggtagcagctagactggtgtgacaacctgtttttaatcagtgactcaaagctgtgatcaccctgatgtcaccgaatggccacagcttgtaaaagagagttacagtggaggtaaaaggagtggcttgcaggatggagaagctgcaccagtgttattggaatatgacatctgatgctggagggtcgcactttcaaaaatgagtcagctggtacatggggttatcatcaatttttagctcttctgtctgggagatacaagtttggaagcaatcttggggtacttacccacaaggctggtggagaccagatcaggagaacctcagtctgacgacattgaagctagccgaatgaagcgagcagctgcaaagcatctaatagaacgctactaccaccagttaactgagggctgtggaaatgaagcctgcacgaatgagttttgtgcttcctgtccaacttttcttcgtatggataataatgcagcagctattaaagccctcgagctttataagattaatgcaaaactctgtgatcctcatccctccaagaaaggagcaagctcagcttaccttgagaactcgaaaggtgcccccaacaactcctgctctgagataaaaatgaacaagaaaggcgctagaattgattttaaagatgtgacttacttaacagaagagaaggtatatgaaattcttgaattatgtagagaaagagaggattattcccctttaatccgtgttattggaagagttttttctagtgctgaggcattggtacagagcttccggaaagttaaacaacacaccaaggaagaactgaaatctcttcaagcaaaagatgaagacaaagatgaagatgaaaaggaaaaagctgcatgttctgctgctgctatggaagaagactcagaagcatcttcctcaaggataggtgatagctcacagggagacaacaatttgcaaaaattaggccctgatgatgtgtctgtggatattgatgccattagaagggtctacaccagattgctctctaatgaaaaaattgaaactgcctttctcaatgcacttgtatatttgtcacctaacgtggaatgtgacttgacgtatcacaatgtatactctcgagatcctaattatctgaatttgttcattatcgtaatggagaatagaaatctccacagtcctgaatatctggaaatggctttgccattattttgcaaagcgatgagcaagctaccccttgcagcccaaggaaaactgatcagactgtggtctaaatacaatgcagaccagattcggagaatgatggagacatttcagcaacttattacttataaagtcataagcaatgaatttaacagtcgaaatctagtgaatgatgatgatgccattgttgctgcttcgaagtgcttgaaaatggtttactatgcaaatgtagtgggaggggaagtggacacaaatcacaatgaagaagatgatgaagagcccatccctgagtccagcgagctgacacttcaggaacttttgggagaagaaagaagaaacaagaaaggtcctcgagtggaccccctggaaactgaacttggtgttaaaaccctggattgtcgaaaaccacttatcccttttgaagagtttattaatgaaccactgaatgaggttctagaaatggataaagattatacttttttcaaagtagaaacagagaacaaattctcttttatgacatgtccctttatattgaatgctgtcacaaagaatttgggattatattatgacaatagaattcgcatgtacagtgaacgaagaatcactgttctctacagcttagttcaaggacagcagttgaatccatatttgagactcaaagttagacgtgaccatatcatagatgatgcacttgtccggctagagatgatcgctatggaaaatcctgcagacttgaagaagcagttgtatgtggaatttgaaggagaacaaggagttgatgagggaggtgtttccaaagaattttttcagctggttgtggaggaaatcttcaatccagatattggtatgttcacatacgatgaatctacaaaattgttttggtttaatccatcttcttttgaaactgagggtcagtttactctgattggcatagtactgggtctggctatttacaataactgtatactggatgtacattttcccatggttgtctacaggaagctaatggggaaaaaaggaacttttcgtgacttgggagactctcacccagttctatatcagagtttaaaagatttattggagtatgaagggaatgtggaagatgacatgatgatcactttccagatatcacagacagatctttttggtaacccaatgatgtatgatctaaaggaaaatggtgataaaattccaattacaaatgaaaacaggaaggaatttgtcaatctttattctgactacattctcaataaatcagtagaaaaacagttcaaggcttttcggagaggttttcatatggtgaccaatgaatctcccttaaagtacttattcagaccagaagaaattgaattgcttatatgtggaagccggaatctagatttccaagcactagaagaaactacagaatatgacggtggctataccagggactctgttctgattagggagttctgggaaatcgttcattcatttacagatgaacagaaaagactcttcttgcagtttacaacgggcacagacagagcacctgtgggaggactaggaaaattaaagatgattatagccaaaaatggcccagacacagaaaggttacctacatctcatacttgctttaatgtgcttttacttccggaatactcaagcaaagaaaaacttaaagagagattgttgaaggccatcacgtatgccaaaggatttggcatgctgtaaaacaaaacaaaacaaaataaaacaaaaaaaaggaaggaaaaaaaaagaaaaaatttaaaaaattttaaaaatataacgagggataaatttttggtggtgatagtgtcccagtacaaaaaggctgtaagatagtcaaccacagtagtcacctatgtctgtgcctcccttctttattggggacatgtgggctggaacagcagatttcagctacatatatgaacaaatcctttattattattataattatttttttgcgtgaaagtgttacatattctttcacttgtatgtacagagaggtttttctgaatatttattttaagggttaaatcacttttgcttgtgtttattactgcttgaggttgagccttttgagtatttaaaaaatatataccaacagaactactctcccaaggaaaatattgccaccatttgtagaccacgtaaccttcaagtatgtgctacttttttgtccctgtatctaactcaaatcaggaactgtattttttttaatgatttgcttttgaaacttgaagtcttgaaaacagtgtgatgcaattactgctgttctagcccccaaagagttttctgtgcaaaatcttgagaatcaatcaataaagaaagatggaaggaagggagaaattggaatgttttaactgcagccctcagaactttagtaacagcacaacaaattaaaaacaaaaacaactcatgccacagtatgtcgtcttcatgtgtcttgcaatgaactgtttcagtagccaatcctctttcttagtatatgaaaggacagggatttttgttcttgttgttctcgttgttgttttaagtttactggggaaagtgcatttggccaaatgaaatggtagtcaagcctattgcaacaaagttaggaagtttgttgtttgtttattataaacaaaaagcatgtgaaagtgcacttaagatagagtttttattaattacttacttattacctagattttaaatagacaatccaaagtctccccttcgtgttgccatcatcttgttgaatcagccattttatcgaggcacgtgatcagtgttgcaacataatgaaaaagatggctactgtgccttgtgttacttaatcatacagtaagctgacctggaaatgaatgaaactattactcctaagaattacattgtatagccccacagattaaatttaattaattaattcaaaacatgttaaacgttactttcatgtactatggaaaagtacaagtaggtttacattactgatttccagaagtaagtagtttcccctttcctagtcttctgtgtatgtgatgttgttaatttcttttattgcattataaaataaaaggattatgtatttttaactaaggtgagacattgatatatccttttgctacaagctatagctaatgtgctgagcttgtgccttggtgattgattgattgattgactgattgttttaactgattactgtagatcaacctgatgatttgtttgtttgaaattggcaggaaaaatgcagctttcaaatcattggggggagaaaaaggatgtctttcaggattattttaattaatttttttcataattgagacagaactgtttgttatgtaccataatgctaaataaaactgtggcacttttcaccataatttaatttagtggaaaaagaagacaatgctttccatattgtgataaggtaacatggggtttttctgggccagcctttagaacactgttagggtacatacgctaccttgatgaaagggaccttcgtgcaactgtagtcatcttaaaggcttctcatccactgtgcttcttaatgtgtaattaaagtgaggagaaattaaatactctgagggcgttttatataataaattcgtgaagaaatgtgtgctcttcagttctcaagttttattattatggtatttattaaagttctacaattgtaataacgtatccatatgacaagttttaaagtggtaattgaaataggttatcagatatagagttgttcacatcaagtagacttttaacagagtcagaatgaacctacccttaaaattttagagaaaaaaaatcgtcggttgcacagaatagctgctctagcttgcttaattatgccgggcatgttgtcactcctcttacttttgctgccttttcattactatttaatggaatgtccctgaacaataaggaagagcaaaacatagacattttgactacagtggatacttcctctaccccaaatgttatgttataaaagtactttttttgcccaggtactctattatatattttggttttctttgaattagacctcaatctccaggaagctctggagggaaaaaaaggaaccataaactaaagtaactggttttccaaataaatgtaaacttttttaaccttttattattatagaacatttcaaacatacataaaacatgaaaacagcctgcagccaaacttttctggaccttggcagctccagcaaatgagctggtcatcctaaccctggtttcctgagacaactacttttggggatgcttgcttgtatagggagatgatagatagatagatacatatcaaaaagaaacttgaaaaaggcttcgaacagaacttgccgatgttactcatccctcctcggtacagacattctgttagaacagatggttgtaatggggcagcatcactccctattcccattaaaaacatgaccattctgagatttcaggccccttcgaggaatttttctcaagaattccatacaaactgtcagaggaagaaatgtcgtcccaagactagtccctgtgtagtcttgatccctttacctgcttactgtaattttttttctctgactttccgccagtgtctaagggccatctgtacccctcccacccttccatgagccactgtataatccaaaaacacaccttccatttgctccctcacttgtctccttttacctcaacagtgttagtgtgtaaagaattgcctggggagggtagagggttttacaagtacagagtcccaagtcttttctcccctccccgttagtgggttggcatttattaataggcactgcaagattttgatgcaggtgtggggtagatatcactgtgaaaggctactaatgcatggtagtttcaccgaaagtacagtcttcaaggatccttataatctcctcattgccaaaatcagtaacatctataaccttgacaacaccctagcttgggctgttgcttctctggctacttgtttttccatcccagtttacccagattttagatggatactcctccaattctgcttaaagtccttacctgttcttgcccagttccctctagtcaacctcagtcactcccaaagattcttccccaatcccatatcttttgctcagacctctgtctctgggatttctttgttacctcatagtcagtagtcctaaaaacaaaattcttcatcttgcatctctatcgaccgaccattctttgtttctttttaagaaatgtaaccttcaccccaatcatcaaaatctctcattcctcaattgtcacaggttgtcacttctttccccctaaacctctcccatcattccttccttctttatactgcccttacaggtcctgatcctctgactcacccggacattcttagcagctgcctaatttcactccctgactctcatctccctcttccaatccttttcattgtgctagaacactatcttgctaattttaatatcctctgcattcagtgcctccacagattgccccctcactgacctttccaatttggccttgtgttacacactttcctcgctgcattcctacccagcatcttcacttgtcatatttctcaaatactcttcatgaccagatatttaaagtacctcatccatgaagacttcatcaacccccaaagtgcctccaatgcttccgtggtagcacagcataatggggtacatttcttagttgaacagtgaggagtcactgggattcttacagagtgtcttagggtctcctcttgatactctttccacatttcagttaaggaattttcttacatctttttttcttctaataacctttgcctggagtgtaagtaaattcatgatagagactgtcatttttaaaaaaaaaaacaaaccattttgcctttcacatgttattacctccatctttctgttatcttgtcagtgttgccacctaaatgattgaaaatgaccgagcatgcagtagaatgtagtgaagtttcctatttcatccattttttgcataagtgcattggtatctgtatatccatctgcccaagcaccagttgttgaaaagactattatttccccatgaatggtcctggtacccttgtcaaagaacagttgaccataaatataagactttctggattctcagtcttactccattgccctatatgtctgtcgttataccagcaccgcactgtcttgatggctgtagcttggtagtaagtttagatttgggatgtgcaagtcctccattttttttttttttttccccaaaatcattttgtctgttttgggtcccttgcattgcatatgaatttttatatgatcattgtgtcaattcctgcaaaacagctgggatcttgatagggatttagttgaattggtagataaatttgagaaataactgctattttaatggtgttaggttttctgttccatgactgtgggatgtctttgcatttgcttaggtctttatttcagtgatgttttagagatttcagtgtgcaagtcttgacgtctttaatttttttctaagtattttactgatgccactttaattatatgattattttctaatttttatttttgtattcatcactggtgttagaaataaaattaatttttgtatattgattttgtatattgtagcttttctaaaattctttttttgtcacttagtattttttgcatatgagatcatgcatctgtgaacagaaatacttttacttcttcctttccagtctagattcctattatttcattttcttgccttagtgtgctggctagcacctccagtacaatattggatagaagtgacaagagcagacatctttttcttgttcctgattttaaggggaaagcattcagtctttcaccattgagtatgatgttagctagctgtgggtttgcttcaagttgaggaaattcttttattaaacctagtttactgagtgttttttaatcaaaaaaaaaaaaaggaggggctgtgggttttgttaaatgcttcttctgtatcaagattttcatgttgttttgtcctttattaatatgttgtattaatggacttttgtatattgaattaactttgcattcctgggataatctcagttgtccatgctacataaaccttgttctatgctgctgga

SEQ ID NO: 123 - DNA, 8939 bp, Homo sapiens
  source 1..8939: mol_type = genomic DNA
gccgcggccgcgagatccgtgtgtctcccaagatggtggcgctgggctcggggtgactacaggagacgacggggccttttcccttcgccaggacccgacacaccaggcttcgctcgctcgcgcacccctccgccgcgtagccatccgccagcgcgggcgcccgccatccgccgcctacttacgcttcacctctgccgacccggcgcgctcggctgcgggcggcggcgcctccttcggctcctcctcggaatagctcgcggcctgtagcccctggcaggagggcccctcagccccccggtgtggacaggcagcggcggctggcgacgaacgccgggatttcggcggccccggcgctccctttcccggcctcgttttccggataaggaagcgcgggtcccgcatgagccccggcggtggcggcagcgaaagagaacgaggcggtggcgggcggaggcggcgggcgagggcgactacgaccagtgaggcggccgccgcagcccaggcgcgggggcgacgacaggttaaaaatctgtaagagcctgattttagaattcaccagctcctcagaagtttggcgaaatatgagttattaagcctacgctcagatcaaggtagcagctagactggtgtgacaacctgtttttaatcagtgactcaaagctgtgatcaccctgatgtcaccgaatggccacagcttgtaaaagagagttacagtggaggtaaaaggagtggcttgcaggatggagaagctgcaccagtgttattggaactctgcctccttacagtatgacatctgatgctggagggtcgcactttcaaaaatgagtcagctggtacatggggttatcatcaatttttagctcttctgtctgggagatacaagtttggaagcaatcttggggtacttacccacaaggctggtggagaccagatcaggagaacctcagtctgacgacattgaagctagccgaatgaagcgagcagctgcaaagcatctaatagaacgctactaccaccagttaactgagggctgtggaaatgaagcctgcacgaatgagttttgtgcttcctgtccaacttttcttcgtatggataataatgcagcagctattaaagccctcgagctttataagattaatgcaaaactctgtgatcctcatccctccaagaaaggagcaagctcagcttaccttgagaactcgaaaggtgcccccaacaactcctgctctgagataaaaatgaacaagaaaggcgctagaattgattttaaagatgtgacttacttaacagaagagaaggtatatgaaattcttgaattatgtagagaaagagaggattattcccctttaatccgtgttattggaagagttttttctagtgctgaggcattggtacagagcttccggaaagttaaacaacacaccaaggaagaactgaaatctcttcaagcaaaagatgaagacaaagatgaagatgaaaaggaaaaagctgcatgttctgctgctgctatggaagaagactcagaagcatcttcctcaaggataggtgatagctcacagggagacaacaatttgcaaaaattaggccctgatgatgtgtctgtggatattgatgccattagaagggtctacaccagattgctctctaatgaaaaaattgaaactgcctttctcaatgcacttgtatatttgtcacctaacgtggaatgtgacttgacgtatcacaatgtatactctcgagatcctaattatctgaatttgttcattatcgtaatggagaatagaaatctccacagtcctgaatatctggaaatggctttgccattattttgcaaagcgatgagcaagctaccccttgcagcccaaggaaaactgatcagactgtggtctaaatacaatgcagaccagattcggagaatgatggagacatttcagcaacttattacttataaagtcataagcaatgaatttaacagtcgaaatctagtgaatgatgatgatgccattgttgctgcttcgaagtgcttgaaaatggtttactatgcaaatgtagtgggaggggaagtggacacaaatcacaatgaagaagatgatgaagagcccatccctgagtccagcgagctgacacttcaggaacttttgggagaagaaagaagaaacaagaaaggtcctcgagtggaccccctggaaactgaacttggtgttaaaaccctggattgtcgaaaaccacttatcccttttgaagagtttattaatgaaccactgaatgaggttctagaaatggataaagattatacttttttcaaagtagaaacagagaacaaattctcttttatgacatgtccctttatattgaatgctgtcacaaagaatttgggattatattatgacaatagaattcgcatgtacagtgaacgaagaatcactgttctctacagcttagttcaaggacagcagttgaatccatatttgagactcaaagttagacgtgaccatatcatagatgatgcacttgtccggctagagatgatcgctatggaaaatcctgcagacttgaagaagcagttgtatgtggaatttgaaggagaacaaggagttgatgagggaggtgtttccaaagaattttttcagctggttgtggaggaaatcttcaatccagatattggtatgttcacatacgatgaatctacaaaattgttttggtttaatccatcttcttttgaaactgagggtcagtttactctgattggcatagtactgggtctggctatttacaataactgtatactggatgtacattttcccatggttgtctacaggaagctaatggggaaaaaaggaacttttcgtgacttgggagactctcacccagttctatatcagagtttaaaagatttattggagtatgaagggaatgtggaagatgacatgatgatcactttccagatatcacagacagatctttttggtaacccaatgatgtatgatctaaaggaaaatggtgataaaattccaattacaaatgaaaacaggaaggaatttgtcaatctttattctgactacattctcaataaatcagtagaaaaacagttcaaggcttttcggagaggttttcatatggtgaccaatgaatctcccttaaagtacttattcagaccagaagaaattgaattgcttatatgtggaagccggaatctagatttccaagcactagaagaaactacagaatatgacggtggctataccagggactctgttctgattagggagttctgggaaatcgttcattcatttacagatgaacagaaaagactcttcttgcagtttacaacgggcacagacagagcacctgtgggaggactaggaaaattaaagatgattatagccaaaaatggcccagacacagaaaggttacctacatctcatacttgctttaatgtgcttttacttccggaatactcaagcaaagaaaaacttaaagagagattgttgaaggccatcacgtatgccaaaggatttggcatgctgtaaaacaaaacaaaacaaaataaaacaaaaaaaaggaaggaaaaaaaaagaaaaaatttaaaaaattttaaaaatataacgagggataaatttttggtggtgatagtgtcccagtacaaaaaggctgtaagatagtcaaccacagtagtcacctatgtctgtgcctcccttctttattggggacatgtgggctggaacagcagatttcagctacatatatgaacaaatcctttattattattataattatttttttgcgtgaaagtgttacatattctttcacttgtatgtacagagaggtttttctgaatatttattttaagggttaaatcacttttgcttgtgtttattactgcttgaggttgagccttttgagtatttaaaaaatatataccaacagaactactctcccaaggaaaatattgccaccatttgtagaccacgtaaccttcaagtatgtgctacttttttgtccctgtatctaactcaaatcaggaactgtattttttttaatgatttgcttttgaaacttgaagtcttgaaaacagtgtgatgcaattactgctgttctagcccccaaagagttttctgtgcaaaatcttgagaatcaatcaataaagaaagatggaaggaagggagaaattggaatgttttaactgcagccctcagaactttagtaacagcacaacaaattaaaaacaaaaacaactcatgccacagtatgtcgtcttcatgtgtcttgcaatgaactgtttcagtagccaatcctctttcttagtatatgaaaggacagggatttttgttcttgttgttctcgttgttgttttaagtttactggggaaagtgcatttggccaaatgaaatggtagtcaagcctattgcaacaaagttaggaagtttgttgtttgtttattataaacaaaaagcatgtgaaagtgcacttaagatagagtttttattaattacttacttattacctagattttaaatagacaatccaaagtctccccttcgtgttgccatcatcttgttgaatcagccattttatcgaggcacgtgatcagtgttgcaacataatgaaaaagatggctactgtgccttgtgttacttaatcatacagtaagctgacctggaaatgaatgaaactattactcctaagaattacattgtatagccccacagattaaatttaattaattaattcaaaacatgttaaacgttactttcatgtactatggaaaagtacaagtaggtttacattactgatttccagaagtaagtagtttcccctttcctagtcttctgtgtatgtgatgttgttaatttcttttattgcattataaaataaaaggattatgtatttttaactaaggtgagacattgatatatccttttgctacaagctatagctaatgtgctgagcttgtgccttggtgattgattgattgattgactgattgttttaactgattactgtagatcaacctgatgatttgtttgtttgaaattggcaggaaaaatgcagctttcaaatcattggggggagaaaaaggatgtctttcaggattattttaattaatttttttcataattgagacagaactgtttgttatgtaccataatgctaaataaaactgtggcacttttcaccataatttaatttagtggaaaaagaagacaatgctttccatattgtgataaggtaacatggggtttttctgggccagcctttagaacactgttagggtacatacgctaccttgatgaaagggaccttcgtgcaactgtagtcatcttaaaggcttctcatccactgtgcttcttaatgtgtaattaaagtgaggagaaattaaatactctgagggcgttttatataataaattcgtgaagaaatgtgtgctcttcagttctcaagttttattattatggtatttattaaagttctacaattgtaataacgtatccatatgacaagttttaaagtggtaattgaaataggttatcagatatagagttgttcacatcaagtagacttttaacagagtcagaatgaacctacccttaaaattttagagaaaaaaaatcgtcggttgcacagaatagctgctctagcttgcttaattatgccgggcatgttgtcactcctcttacttttgctgccttttcattactatttaatggaatgtccctgaacaataaggaagagcaaaacatagacattttgactacagtggatacttcctctaccccaaatgttatgttataaaagtactttttttgcccaggtactctattatatattttggttttctttgaattagacctcaatctccaggaagctctggagggaaaaaaaggaaccataaactaaagtaactggttttccaaataaatgtaaacttttttaaccttttattattatagaacatttcaaacatacataaaacatgaaaacagcctgcagccaaacttttctggaccttggcagctccagcaaatgagctggtcatcctaaccctggtttcctgagacaactacttttggggatgcttgcttgtatagggagatgatagatagatagatacatatcaaaaagaaacttgaaaaaggcttcgaacagaacttgccgatgttactcatccctcctcggtacagacattctgttagaacagatggttgtaatggggcagcatcactccctattcccattaaaaacatgaccattctgagatttcaggccccttcgaggaatttttctcaagaattccatacaaactgtcagaggaagaaatgtcgtcccaagactagtccctgtgtagtcttgatccctttacctgcttactgtaattttttttctctgactttccgccagtgtctaagggccatctgtacccctcccacccttccatgagccactgtataatccaaaaacacaccttccatttgctccctcacttgtctccttttacctcaacagtgttagtgtgtaaagaattgcctggggagggtagagggttttacaagtacagagtcccaagtcttttctcccctccccgttagtgggttggcatttattaataggcactgcaagattttgatgcaggtgtggggtagatatcactgtgaaaggctactaatgcatggtagtttcaccgaaagtacagtcttcaaggatccttataatctcctcattgccaaaatcagtaacatctataaccttgacaacaccctagcttgggctgttgcttctctggctacttgtttttccatcccagtttacccagattttagatggatactcctccaattctgcttaaagtccttacctgttcttgcccagttccctctagtcaacctcagtcactcccaaagattcttccccaatcccatatcttttgctcagacctctgtctctgggatttctttgttacctcatagtcagtagtcctaaaaacaaaattcttcatcttgcatctctatcgaccgaccattctttgtttctttttaagaaatgtaaccttcaccccaatcatcaaaatctctcattcctcaattgtcacaggttgtcacttctttccccctaaacctctcccatcattccttccttctttatactgcccttacaggtcctgatcctctgactcacccggacattcttagcagctgcctaatttcactccctgactctcatctccctcttccaatccttttcattgtgctagaacactatcttgctaattttaatatcctctgcattcagtgcctccacagattgccccctcactgacctttccaatttggccttgtgttacacactttcctcgctgcattcctacccagcatcttcacttgtcatatttctcaaatactcttcatgaccagatatttaaagtacctcatccatgaagacttcatcaacccccaaagtgcctccaatgcttccgtggtagcacagcataatggggtacatttcttagttgaacagtgaggagtcactgggattcttacagagtgtcttagggtctcctcttgatactctttccacatttcagttaaggaattttcttacatctttttttcttctaataacctttgcctggagtgtaagtaaattcatgatagagactgtcatttttaaaaaaaaaaacaaaccattttgcctttcacatgttattacctccatctttctgttatcttgtcagtgttgccacctaaatgattgaaaatgaccgagcatgcagtagaatgtagtgaagtttcctatttcatccattttttgcataagtgcattggtatctgtatatccatctgcccaagcaccagttgttgaaaagactattatttccccatgaatggtcctggtacccttgtcaaagaacagttgaccataaatataagactttctggattctcagtcttactccattgccctatatgtctgtcgttataccagcaccgcactgtcttgatggctgtagcttggtagtaagtttagatttgggatgtgcaagtcctccattttttttttttttttccccaaaatcattttgtctgttttgggtcccttgcattgcatatgaatttttatatgatcattgtgtcaattcctgcaaaacagctgggatcttgatagggatttagttgaattggtagataaatttgagaaataactgctattttaatggtgttaggttttctgttccatgactgtgggatgtctttgcatttgcttaggtctttatttcagtgatgttttagagatttcagtgtgcaagtcttgacgtctttaatttttttctaagtattttactgatgccactttaattatatgattattttctaatttttatttttgtattcatcactggtgttagaaataaaattaatttttgtatattgattttgtatattgtagcttttctaaaattctttttttgtcacttagtattttttgcatatgagatcatgcatctgtgaacagaaatacttttacttcttcctttccagtctagattcctattatttcattttcttgccttagtgtgctggctagcacctccagtacaatattggatagaagtgacaagagcagacatctttttcttgttcctgattttaaggggaaagcattcagtctttcaccattgagtatgatgttagctagctgtgggtttgcttcaagttgaggaaattcttttattaaacctagtttactgagtgttttttaatcaaaaaaaaaaaaaggaggggctgtgggttttgttaaatgcttcttctgtatcaagattttcatgttgttttgtcctttattaatatgttgtattaatggacttttgtatattgaattaactttgcattcctgggataatctcagttgtccatgctacataaaccttgttctatgctgctgga

SEQ ID NO: 124 - DNA, 8742 bp, Homo sapiens
  source 1..8742: mol_type = genomic DNA
ttcgccaggacccgacacaccaggcttcgctcgctcgcgcacccctccgccgcgtagccatccgccagcgcgggcgcccgccatccgccgcctacttacgcttcacctctgccgacccggcgcgctcggctgcgggcggcggcgcctccttcggctcctcctcggaatagctcgcggcctgtagcccctggcaggagggcccctcagccccccggtgtggacaggcagcggcggctggcgacgaacgccgggatttcggcggccccggcgctccctttcccggcctcgttttccggataaggaagcgcgggtcccgcatgagccccggcggtggcggcagcgaaagagaacgaggcggtggcgggcggaggcggcgggcgagggcgactacgaccagtgaggcggccgccgcagcccaggcgcgggggcgacgacaggttaaaaatctgtaagagcctgattttagaattcaccagctcctcagaagtttggcgaaatatgagttattaagcctacgctcagatcaaggtagcagctagactggtgtgacaacctgtttttaatcagtgactcaaagctgtgatcaccctgatgtcaccgaatggccacagcttgtaaaagatcaggagaacctcagtctgacgacattgaagctagccgaatacacaggagcccatgaaaggcatcacgtgtggaaggaagtgacacgagtcatagtctgccctgcttttctaccacctgaagcatcatataaacctatatcttctgtttcaaatgaagcgagcagctgcaaagcatctaatagaacgctactaccaccagttaactgagggctgtggaaatgaagcctgcacgaatgagttttgtgcttcctgtccaacttttcttcgtatggataataatgcagcagctattaaagccctcgagctttataagattaatgcaaaactctgtgatcctcatccctccaagaaaggagcaagctcagcttaccttgagaactcgaaaggtgcccccaacaactcctgctctgagataaaaatgaacaagaaaggcgctagaattgattttaaagatgtgacttacttaacagaagagaaggtatatgaaattcttgaattatgtagagaaagagaggattattcccctttaatccgtgttattggaagagttttttctagtgctgaggcattggtacagagcttccggaaagttaaacaacacaccaaggaagaactgaaatctcttcaagcaaaagatgaagacaaagatgaagatgaaaaggaaaaagctgcatgttctgctgctgctatggaagaagactcagaagcatcttcctcaaggataggtgatagctcacagggagacaacaatttgcaaaaattaggccctgatgatgtgtctgtggatattgatgccattagaagggtctacaccagattgctctctaatgaaaaaattgaaactgcctttctcaatgcacttgtatatttgtcacctaacgtggaatgtgacttgacgtatcacaatgtatactctcgagatcctaattatctgaatttgttcattatcgtaatggagaatagaaatctccacagtcctgaatatctggaaatggctttgccattattttgcaaagcgatgagcaagctaccccttgcagcccaaggaaaactgatcagactgtggtctaaatacaatgcagaccagattcggagaatgatggagacatttcagcaacttattacttataaagtcataagcaatgaatttaacagtcgaaatctagtgaatgatgatgatgccattgttgctgcttcgaagtgcttgaaaatggtttactatgcaaatgtagtgggaggggaagtggacacaaatcacaatgaagaagatgatgaagagcccatccctgagtccagcgagctgacacttcaggaacttttgggagaagaaagaagaaacaagaaaggtcctcgagtggaccccctggaaactgaacttggtgttaaaaccctggattgtcgaaaaccacttatcccttttgaagagtttattaatgaaccactgaatgaggttctagaaatggataaagattatacttttttcaaagtagaaacagagaacaaattctcttttatgacatgtccctttatattgaatgctgtcacaaagaatttgggattatattatgacaatagaattcgcatgtacagtgaacgaagaatcactgttctctacagcttagttcaaggacagcagttgaatccatatttgagactcaaagttagacgtgaccatatcatagatgatgcacttgtccggctagagatgatcgctatggaaaatcctgcagacttgaagaagcagttgtatgtggaatttgaaggagaacaaggagttgatgagggaggtgtttccaaagaattttttcagctggttgtggaggaaatcttcaatccagatattggtatgttcacatacgatgaatctacaaaattgttttggtttaatccatcttcttttgaaactgagggtcagtttactctgattggcatagtactgggtctggctatttacaataactgtatactggatgtacattttcccatggttgtctacaggaagctaatggggaaaaaaggaacttttcgtgacttgggagactctcacccagttctatatcagagtttaaaagatttattggagtatgaagggaatgtggaagatgacatgatgatcactttccagatatcacagacagatctttttggtaacccaatgatgtatgatctaaaggaaaatggtgataaaattccaattacaaatgaaaacaggaaggaatttgtcaatctttattctgactacattctcaataaatcagtagaaaaacagttcaaggcttttcggagaggttttcatatggtgaccaatgaatctcccttaaagtacttattcagaccagaagaaattgaattgcttatatgtggaagccggaatctagatttccaagcactagaagaaactacagaatatgacggtggctataccagggactctgttctgattagggagttctgggaaatcgttcattcatttacagatgaacagaaaagactcttcttgcagtttacaacgggcacagacagagcacctgtgggaggactaggaaaattaaagatgattatagccaaaaatggcccagacacagaaaggttacctacatctcatacttgctttaatgtgcttttacttccggaatactcaagcaaagaaaaacttaaagagagattgttgaaggccatcacgtatgccaaaggatttggcatgctgtaaaacaaaacaaaacaaaataaaacaaaaaaaaggaaggaaaaaaaaagaaaaaatttaaaaaattttaaaaatataacgagggataaatttttggtggtgatagtgtcccagtacaaaaaggctgtaagatagtcaaccacagtagtcacctatgtctgtgcctcccttctttattggggacatgtgggctggaacagcagatttcagctacatatatgaacaaatcctttattattattataattatttttttgcgtgaaagtgttacatattctttcacttgtatgtacagagaggtttttctgaatatttattttaagggttaaatcacttttgcttgtgtttattactgcttgaggttgagccttttgagtatttaaaaaatatataccaacagaactactctcccaaggaaaatattgccaccatttgtagaccacgtaaccttcaagtatgtgctacttttttgtccctgtatctaactcaaatcaggaactgtattttttttaatgatttgcttttgaaacttgaagtcttgaaaacagtgtgatgcaattactgctgttctagcccccaaagagttttctgtgcaaaatcttgagaatcaatcaataaagaaagatggaaggaagggagaaattggaatgttttaactgcagccctcagaactttagtaacagcacaacaaattaaaaacaaaaacaactcatgccacagtatgtcgtcttcatgtgtcttgcaatgaactgtttcagtagccaatcctctttcttagtatatgaaaggacagggatttttgttcttgttgttctcgttgttgttttaagtttactggggaaagtgcatttggccaaatgaaatggtagtcaagcctattgcaacaaagttaggaagtttgttgtttgtttattataaacaaaaagcatgtgaaagtgcacttaagatagagtttttattaattacttacttattacctagattttaaatagacaatccaaagtctccccttcgtgttgccatcatcttgttgaatcagccattttatcgaggcacgtgatcagtgttgcaacataatgaaaaagatggctactgtgccttgtgttacttaatcatacagtaagctgacctggaaatgaatgaaactattactcctaagaattacattgtatagccccacagattaaatttaattaattaattcaaaacatgttaaacgttactttcatgtactatggaaaagtacaagtaggtttacattactgatttccagaagtaagtagtttcccctttcctagtcttctgtgtatgtgatgttgttaatttcttttattgcattataaaataaaaggattatgtatttttaactaaggtgagacattgatatatccttttgctacaagctatagctaatgtgctgagcttgtgccttggtgattgattgattgattgactgattgttttaactgattactgtagatcaacctgatgatttgtttgtttgaaattggcaggaaaaatgcagctttcaaatcattggggggagaaaaaggatgtctttcaggattattttaattaatttttttcataattgagacagaactgtttgttatgtaccataatgctaaataaaactgtggcacttttcaccataatttaatttagtggaaaaagaagacaatgctttccatattgtgataaggtaacatggggtttttctgggccagcctttagaacactgttagggtacatacgctaccttgatgaaagggaccttcgtgcaactgtagtcatcttaaaggcttctcatccactgtgcttcttaatgtgtaattaaagtgaggagaaattaaatactctgagggcgttttatataataaattcgtgaagaaatgtgtgctcttcagttctcaagttttattattatggtatttattaaagttctacaattgtaataacgtatccatatgacaagttttaaagtggtaattgaaataggttatcagatatagagttgttcacatcaagtagacttttaacagagtcagaatgaacctacccttaaaattttagagaaaaaaaatcgtcggttgcacagaatagctgctctagcttgcttaattatgccgggcatgttgtcactcctcttacttttgctgccttttcattactatttaatggaatgtccctgaacaataaggaagagcaaaacatagacattttgactacagtggatacttcctctaccccaaatgttatgttataaaagtactttttttgcccaggtactctattatatattttggttttctttgaattagacctcaatctccaggaagctctggagggaaaaaaaggaaccataaactaaagtaactggttttccaaataaatgtaaacttttttaaccttttattattatagaacatttcaaacatacataaaacatgaaaacagcctgcagccaaacttttctggaccttggcagctccagcaaatgagctggtcatcctaaccctggtttcctgagacaactacttttggggatgcttgcttgtatagggagatgatagatagatagatacatatcaaaaagaaacttgaaaaaggcttcgaacagaacttgccgatgttactcatccctcctcggtacagacattctgttagaacagatggttgtaatggggcagcatcactccctattcccattaaaaacatgaccattctgagatttcaggccccttcgaggaatttttctcaagaattccatacaaactgtcagaggaagaaatgtcgtcccaagactagtccctgtgtagtcttgatccctttacctgcttactgtaattttttttctctgactttccgccagtgtctaagggccatctgtacccctcccacccttccatgagccactgtataatccaaaaacacaccttccatttgctccctcacttgtctccttttacctcaacagtgttagtgtgtaaagaattgcctggggagggtagagggttttacaagtacagagtcccaagtcttttctcccctccccgttagtgggttggcatttattaataggcactgcaagattttgatgcaggtgtggggtagatatcactgtgaaaggctactaatgcatggtagtttcaccgaaagtacagtcttcaaggatccttataatctcctcattgccaaaatcagtaacatctataaccttgacaacaccctagcttgggctgttgcttctctggctacttgtttttccatcccagtttacccagattttagatggatactcctccaattctgcttaaagtccttacctgttcttgcccagttccctctagtcaacctcagtcactcccaaagattcttccccaatcccatatcttttgctcagacctctgtctctgggatttctttgttacctcatagtcagtagtcctaaaaacaaaattcttcatcttgcatctctatcgaccgaccattctttgtttctttttaagaaatgtaaccttcaccccaatcatcaaaatctctcattcctcaattgtcacaggttgtcacttctttccccctaaacctctcccatcattccttccttctttatactgcccttacaggtcctgatcctctgactcacccggacattcttagcagctgcctaatttcactccctgactctcatctccctcttccaatccttttcattgtgctagaacactatcttgctaattttaatatcctctgcattcagtgcctccacagattgccccctcactgacctttccaatttggccttgtgttacacactttcctcgctgcattcctacccagcatcttcacttgtcatatttctcaaatactcttcatgaccagatatttaaagtacctcatccatgaagacttcatcaacccccaaagtgcctccaatgcttccgtggtagcacagcataatggggtacatttcttagttgaacagtgaggagtcactgggattcttacagagtgtcttagggtctcctcttgatactctttccacatttcagttaaggaattttcttacatctttttttcttctaataacctttgcctggagtgtaagtaaattcatgatagagactgtcatttttaaaaaaaaaaacaaaccattttgcctttcacatgttattacctccatctttctgttatcttgtcagtgttgccacctaaatgattgaaaatgaccgagcatgcagtagaatgtagtgaagtttcctatttcatccattttttgcataagtgcattggtatctgtatatccatctgcccaagcaccagttgttgaaaagactattatttccccatgaatggtcctggtacccttgtcaaagaacagttgaccataaatataagactttctggattctcagtcttactccattgccctatatgtctgtcgttataccagcaccgcactgtcttgatggctgtagcttggtagtaagtttagatttgggatgtgcaagtcctccattttttttttttttttccccaaaatcattttgtctgttttgggtcccttgcattgcatatgaatttttatatgatcattgtgtcaattcctgcaaaacagctgggatcttgatagggatttagttgaattggtagataaatttgagaaataactgctattttaatggtgttaggttttctgttccatgactgtgggatgtctttgcatttgcttaggtctttatttcagtgatgttttagagatttcagtgtgcaagtcttgacgtctttaatttttttctaagtattttactgatgccactttaattatatgattattttctaatttttatttttgtattcatcactggtgttagaaataaaattaatttttgtatattgattttgtatattgtagcttttctaaaattctttttttgtcacttagtattttttgcatatgagatcatgcatctgtgaacagaaatacttttacttcttcctttccagtctagattcctattatttcattttcttgccttagtgtgctggctagcacctccagtacaatattggatagaagtgacaagagcagacatctttttcttgttcctgattttaaggggaaagcattcagtctttcaccattgagtatgatgttagctagctgtgggtttgcttcaagttgaggaaattcttttattaaacctagtttactgagtgttttttaatcaaaaaaaaaaaaaggaggggctgtgggttttgttaaatgcttcttctgtatcaagattttcatgttgttttgtcctttattaatatgttgtattaatggacttttgtatattgaattaactttgcattcctgggataatctcagttgtccatgctacataaaccttgttctatgctgctgga

SEQ ID NO: 125 - DNA, 8725 bp, Homo sapiens
  source 1..8725: mol_type = genomic DNA
tctcccaagatggtggcgctgggctcggggtgactacaggagacgacggggccttttcccttcgccaggacccgacacaccaggcttcgctcgctcgcgcacccctccgccgcgtagccatccgccagcgcgggcgcccgccatccgccgcctacttacgcttcacctctgccgacccggcgcgctcggctgcgggcggcggcgcctccttcggctcctcctcggaatagctcgcggcctgtagcccctggcaggagggcccctcagccccccggtgtggacaggcagcggcggctggcgacgaacgccgggatttcggcggccccggcgctccctttcccggcctcgttttccggataaggaagcgcgggtcccgcatgagccccggcggtggcggcagcgaaagagaacgaggcggtggcgggcggaggcggcgggcgagggcgactacgaccagtgaggcggccgccgcagcccaggcgcgggggcgacgacagggtaaataccttaaattggaattactgggtcacatggttaaaaatctgtaagagcctgattttagaattcaccagctcctcagaagtttggcgaaatatgagttattaagcctacgctcagatcaaggtagcagctagactggtgtgacaacctgtttttaatcagtgactcaaagctgtgatcaccctgatgtcaccgaatggccacagcttgtaaaagatcaggagaacctcagtctgacgacattgaagctagccgaatgaagcgagcagctgcaaagcatctaatagaacgctactaccaccagttaactgagggctgtggaaatgaagcctgcacgaatgagttttgtgcttcctgtccaacttttcttcgtatggataataatgcagcagctattaaagccctcgagctttataagattaatgcaaaactctgtgatcctcatccctccaagaaaggagcaagctcagcttaccttgagaactcgaaaggtgcccccaacaactcctgctctgagataaaaatgaacaagaaaggcgctagaattgattttaaagatgtgacttacttaacagaagagaaggtatatgaaattcttgaattatgtagagaaagagaggattattcccctttaatccgtgttattggaagagttttttctagtgctgaggcattggtacagagcttccggaaagttaaacaacacaccaaggaagaactgaaatctcttcaagcaaaagatgaagacaaagatgaagatgaaaaggaaaaagctgcatgttctgctgctgctatggaagaagactcagaagcatcttcctcaaggataggtgatagctcacagggagacaacaatttgcaaaaattaggccctgatgatgtgtctgtggatattgatgccattagaagggtctacaccagattgctctctaatgaaaaaattgaaactgcctttctcaatgcacttgtatatttgtcacctaacgtggaatgtgacttgacgtatcacaatgtatactctcgagatcctaattatctgaatttgttcattatcgtaatggagaatagaaatctccacagtcctgaatatctggaaatggctttgccattattttgcaaagcgatgagcaagctaccccttgcagcccaaggaaaactgatcagactgtggtctaaatacaatgcagaccagattcggagaatgatggagacatttcagcaacttattacttataaagtcataagcaatgaatttaacagtcgaaatctagtgaatgatgatgatgccattgttgctgcttcgaagtgcttgaaaatggtttactatgcaaatgtagtgggaggggaagtggacacaaatcacaatgaagaagatgatgaagagcccatccctgagtccagcgagctgacacttcaggaacttttgggagaagaaagaagaaacaagaaaggtcctcgagtggaccccctggaaactgaacttggtgttaaaaccctggattgtcgaaaaccacttatcccttttgaagagtttattaatgaaccactgaatgaggttctagaaatggataaagattatacttttttcaaagtagaaacagagaacaaattctcttttatgacatgtccctttatattgaatgctgtcacaaagaatttgggattatattatgacaatagaattcgcatgtacagtgaacgaagaatcactgttctctacagcttagttcaaggacagcagttgaatccatatttgagactcaaagttagacgtgaccatatcatagatgatgcacttgtccggctagagatgatcgctatggaaaatcctgcagacttgaagaagcagttgtatgtggaatttgaaggagaacaaggagttgatgagggaggtgtttccaaagaattttttcagctggttgtggaggaaatcttcaatccagatattggtatgttcacatacgatgaatctacaaaattgttttggtttaatccatcttcttttgaaactgagggtcagtttactctgattggcatagtactgggtctggctatttacaataactgtatactggatgtacattttcccatggttgtctacaggaagctaatggggaaaaaaggaacttttcgtgacttgggagactctcacccagttctatatcagagtttaaaagatttattggagtatgaagggaatgtggaagatgacatgatgatcactttccagatatcacagacagatctttttggtaacccaatgatgtatgatctaaaggaaaatggtgataaaattccaattacaaatgaaaacaggaaggaatttgtcaatctttattctgactacattctcaataaatcagtagaaaaacagttcaaggcttttcggagaggttttcatatggtgaccaatgaatctcccttaaagtacttattcagaccagaagaaattgaattgcttatatgtggaagccggaatctagatttccaagcactagaagaaactacagaatatgacggtggctataccagggactctgttctgattagggagttctgggaaatcgttcattcatttacagatgaacagaaaagactcttcttgcagtttacaacgggcacagacagagcacctgtgggaggactaggaaaattaaagatgattatagccaaaaatggcccagacacagaaaggttacctacatctcatacttgctttaatgtgcttttacttccggaatactcaagcaaagaaaaacttaaagagagattgttgaaggccatcacgtatgccaaaggatttggcatgctgtaaaacaaaacaaaacaaaataaaacaaaaaaaaggaaggaaaaaaaaagaaaaaatttaaaaaattttaaaaatataacgagggataaatttttggtggtgatagtgtcccagtacaaaaaggctgtaagatagtcaaccacagtagtcacctatgtctgtgcctcccttctttattggggacatgtgggctggaacagcagatttcagctacatatatgaacaaatcctttattattattataattatttttttgcgtgaaagtgttacatattctttcacttgtatgtacagagaggtttttctgaatatttattttaagggttaaatcacttttgcttgtgtttattactgcttgaggttgagccttttgagtatttaaaaaatatataccaacagaactactctcccaaggaaaatattgccaccatttgtagaccacgtaaccttcaagtatgtgctacttttttgtccctgtatctaactcaaatcaggaactgtattttttttaatgatttgcttttgaaacttgaagtcttgaaaacagtgtgatgcaattactgctgttctagcccccaaagagttttctgtgcaaaatcttgagaatcaatcaataaagaaagatggaaggaagggagaaattggaatgttttaactgcagccctcagaactttagtaacagcacaacaaattaaaaacaaaaacaactcatgccacagtatgtcgtcttcatgtgtcttgcaatgaactgtttcagtagccaatcctctttcttagtatatgaaaggacagggatttttgttcttgttgttctcgttgttgttttaagtttactggggaaagtgcatttggccaaatgaaatggtagtcaagcctattgcaacaaagttaggaagtttgttgtttgtttattataaacaaaaagcatgtgaaagtgcacttaagatagagtttttattaattacttacttattacctagattttaaatagacaatccaaagtctccccttcgtgttgccatcatcttgttgaatcagccattttatcgaggcacgtgatcagtgttgcaacataatgaaaaagatggctactgtgccttgtgttacttaatcatacagtaagctgacctggaaatgaatgaaactattactcctaagaattacattgtatagccccacagattaaatttaattaattaattcaaaacatgttaaacgttactttcatgtactatggaaaagtacaagtaggtttacattactgatttccagaagtaagtagtttcccctttcctagtcttctgtgtatgtgatgttgttaatttcttttattgcattataaaataaaaggattatgtatttttaactaaggtgagacattgatatatccttttgctacaagctatagctaatgtgctgagcttgtgccttggtgattgattgattgattgactgattgttttaactgattactgtagatcaacctgatgatttgtttgtttgaaattggcaggaaaaatgcagctttcaaatcattggggggagaaaaaggatgtctttcaggattattttaattaatttttttcataattgagacagaactgtttgttatgtaccataatgctaaataaaactgtggcacttttcaccataatttaatttagtggaaaaagaagacaatgctttccatattgtgataaggtaacatggggtttttctgggccagcctttagaacactgttagggtacatacgctaccttgatgaaagggaccttcgtgcaactgtagtcatcttaaaggcttctcatccactgtgcttcttaatgtgtaattaaagtgaggagaaattaaatactctgagggcgttttatataataaattcgtgaagaaatgtgtgctcttcagttctcaagttttattattatggtatttattaaagttctacaattgtaataacgtatccatatgacaagttttaaagtggtaattgaaataggttatcagatatagagttgttcacatcaagtagacttttaacagagtcagaatgaacctacccttaaaattttagagaaaaaaaatcgtcggttgcacagaatagctgctctagcttgcttaattatgccgggcatgttgtcactcctcttacttttgctgccttttcattactatttaatggaatgtccctgaacaataaggaagagcaaaacatagacattttgactacagtggatacttcctctaccccaaatgttatgttataaaagtactttttttgcccaggtactctattatatattttggttttctttgaattagacctcaatctccaggaagctctggagggaaaaaaaggaaccataaactaaagtaactggttttccaaataaatgtaaacttttttaaccttttattattatagaacatttcaaacatacataaaacatgaaaacagcctgcagccaaacttttctggaccttggcagctccagcaaatgagctggtcatcctaaccctggtttcctgagacaactacttttggggatgcttgcttgtatagggagatgatagatagatagatacatatcaaaaagaaacttgaaaaaggcttcgaacagaacttgccgatgttactcatccctcctcggtacagacattctgttagaacagatggttgtaatggggcagcatcactccctattcccattaaaaacatgaccattctgagatttcaggccccttcgaggaatttttctcaagaattccatacaaactgtcagaggaagaaatgtcgtcccaagactagtccctgtgtagtcttgatccctttacctgcttactgtaattttttttctctgactttccgccagtgtctaagggccatctgtacccctcccacccttccatgagccactgtataatccaaaaacacaccttccatttgctccctcacttgtctccttttacctcaacagtgttagtgtgtaaagaattgcctggggagggtagagggttttacaagtacagagtcccaagtcttttctcccctccccgttagtgggttggcatttattaataggcactgcaagattttgatgcaggtgtggggtagatatcactgtgaaaggctactaatgcatggtagtttcaccgaaagtacagtcttcaaggatccttataatctcctcattgccaaaatcagtaacatctataaccttgacaacaccctagcttgggctgttgcttctctggctacttgtttttccatcccagtttacccagattttagatggatactcctccaattctgcttaaagtccttacctgttcttgcccagttccctctagtcaacctcagtcactcccaaagattcttccccaatcccatatcttttgctcagacctctgtctctgggatttctttgttacctcatagtcagtagtcctaaaaacaaaattcttcatcttgcatctctatcgaccgaccattctttgtttctttttaagaaatgtaaccttcaccccaatcatcaaaatctctcattcctcaattgtcacaggttgtcacttctttccccctaaacctctcccatcattccttccttctttatactgcccttacaggtcctgatcctctgactcacccggacattcttagcagctgcctaatttcactccctgactctcatctccctcttccaatccttttcattgtgctagaacactatcttgctaattttaatatcctctgcattcagtgcctccacagattgccccctcactgacctttccaatttggccttgtgttacacactttcctcgctgcattcctacccagcatcttcacttgtcatatttctcaaatactcttcatgaccagatatttaaagtacctcatccatgaagacttcatcaacccccaaagtgcctccaatgcttccgtggtagcacagcataatggggtacatttcttagttgaacagtgaggagtcactgggattcttacagagtgtcttagggtctcctcttgatactctttccacatttcagttaaggaattttcttacatctttttttcttctaataacctttgcctggagtgtaagtaaattcatgatagagactgtcatttttaaaaaaaaaaacaaaccattttgcctttcacatgttattacctccatctttctgttatcttgtcagtgttgccacctaaatgattgaaaatgaccgagcatgcagtagaatgtagtgaagtttcctatttcatccattttttgcataagtgcattggtatctgtatatccatctgcccaagcaccagttgttgaaaagactattatttccccatgaatggtcctggtacccttgtcaaagaacagttgaccataaatataagactttctggattctcagtcttactccattgccctatatgtctgtcgttataccagcaccgcactgtcttgatggctgtagcttggtagtaagtttagatttgggatgtgcaagtcctccattttttttttttttttccccaaaatcattttgtctgttttgggtcccttgcattgcatatgaatttttatatgatcattgtgtcaattcctgcaaaacagctgggatcttgatagggatttagttgaattggtagataaatttgagaaataactgctattttaatggtgttaggttttctgttccatgactgtgggatgtctttgcatttgcttaggtctttatttcagtgatgttttagagatttcagtgtgcaagtcttgacgtctttaatttttttctaagtattttactgatgccactttaattatatgattattttctaatttttatttttgtattcatcactggtgttagaaataaaattaatttttgtatattgattttgtatattgtagcttttctaaaattctttttttgtcacttagtattttttgcatatgagatcatgcatctgtgaacagaaatacttttacttcttcctttccagtctagattcctattatttcattttcttgccttagtgtgctggctagcacctccagtacaatattggatagaagtgacaagagcagacatctttttcttgttcctgattttaaggggaaagcattcagtctttcaccattgagtatgatgttagctagctgtgggtttgcttcaagttgaggaaattcttttattaaacctagtttactgagtgttttttaatcaaaaaaaaaaaaaggaggggctgtgggttttgttaaatgcttcttctgtatcaagattttcatgttgttttgtcctttattaatatgttgtattaatggacttttgtatattgaattaactttgcattcctgggataatctcagttgtccatgctacataaaccttgttctatgctgctgga

SEQ ID NO: 126 - DNA, 5274 bp, Homo sapiens
  source 1..5274: mol_type = genomic DNA
agtcctcccgtcttgcgccgcggccgcgagatccgtgtgtctcccaagatggtggcgctgggctcggggtgactacaggagacgacggggccttttcccttcgccaggacccgacacaccaggcttcgctcgctcgcgcacccctccgccgcgtagccatccgccagcgcgggcgcccgccatccgccgcctacttacgcttcacctctgccgacccggcgcgctcggctgcgggcggcggcgcctccttcggctcctcctcggaatagctcgcggcctgtagcccctggcaggagggcccctcagccccccggtgtggacaggcagcggcggctggcgacgaacgccgggatttcggcggccccggcgctccctttcccggcctcgttttccggataaggaagcgcgggtcccgcatgagccccggcggtggcggcagcgaaagagaacgaggcggtggcgggcggaggcggcgggcgagggcgactacgaccagtgaggcggccgccgcagcccaggcgcgggggcgacgacaggttaaaaatctgtaagagcctgattttagaattcaccagctcctcagaagtttggcgaaatatgagttattaagcctacgctcagatcaaggtagcagctagactggtgtgacaacctgtttttaatcagtgactcaaagctgtgatcaccctgatgtcaccgaatggccacagcttgtaaaagagagttacagtggaggtaaaaggagtggcttgcaggatggagaagctgcaccagtgttattggaaatcaggagaacctcagtctgacgacattgaagctagccgaatgaagcgagcagctgcaaagcatctaatagaacgctactaccaccagttaactgagggctgtggaaatgaagcctgcacgaatgagttttgtgcttcctgtccaacttttcttcgtatggataataatgcagcagctattaaagccctcgagctttataagattaatgcaaaactctgtgatcctcatccctccaagaaaggagcaagctcagcttaccttgagaactcgaaaggtgcccccaacaactcctgctctgagataaaaatgaacaagaaaggcgctagaattgattttaaagatgtgacttacttaacagaagagaaggtatatgaaattcttgaattatgtagagaaagagaggattattcccctttaatccgtgttattggaagagttttttctagtgctgaggcattggtacagagcttccggaaagttaaacaacacaccaaggaagaactgaaatctcttcaagcaaaagatgaagacaaagatgaagatgaaaaggaaaaagctgcatgttctgctgctgctatggaagaagactcagaagcatcttcctcaaggataggtgatagctcacagggagacaacaatttgcaaaaattaggccctgatgatgtgtctgtggatattgatgccattagaagggtctacaccagattgctctctaatgaaaaaattgaaactgcctttctcaatgcacttgtatatttgtcacctaacgtggaatgtgacttgacgtatcacaatgtatactctcgagatcctaattatctgaatttgttcattatcgtaatggagaatagaaatctccacagtcctgaatatctggaaatggctttgccattattttgcaaagcgatgagcaagctaccccttgcagcccaaggaaaactgatcagactgtggtctaaatacaatgcagaccagattcggagaatgatggagacatttcagcaacttattacttataaagtcataagcaatgaatttaacagtcgaaatctagtgaatgatgatgatgccattgttgctgcttcgaagtgcttgaaaatggtttactatgcaaatgtagtgggaggggaagtggacacaaatcacaatgaagaagatgatgaagagcccatccctgagtccagcgagctgacacttcaggaacttttgggagaagaaagaagaaacaagaaaggtcctcgagtggaccccctggaaactgaacttggtgttaaaaccctggattgtcgaaaaccacttatcccttttgaagagtttattaatgaaccactgaatgaggttctagaaatggataaagattatacttttttcaaagtagaaacagagaacaaattctcttttatgacatgtccctttatattgaatgctgtcacaaagaatttgggattatattatgacaatagaattcgcatgtacagtgaacgaagaatcactgttctctacagcttagttcaaggacagcagttgaatccatatttgagactcaaagttagacgtgaccatatcatagatgatgcacttgtccggctagagatgatcgctatggaaaatcctgcagacttgaagaagcagttgtatgtggaatttgaaggagaacaaggagttgatgagggaggtgtttccaaagaattttttcagctggttgtggaggaaatcttcaatccagatattggtatgttcacatacgatgaatctacaaaattgttttggtttaatccatcttcttttgaaactgagggtcagtttactctgattggcatagtactgggtctggctatttacaataactgtatactggatgtacattttcccatggttgtctacaggaagctaatggggaaaaaaggaacttttcgtgacttgggagactctcacccagttctatatcagagtttaaaagatttattggagtatgaagggaatgtggaagatgacatgatgatcactttccagatatcacagacagatctttttggtaacccaatgatgtatgatctaaaggaaaatggtgataaaattccaattacaaatgaaaacaggaaggaatttgtcaatctttattctgactacattctcaataaatcagtagaaaaacagttcaaggcttttcggagaggttttcatatggtgaccaatgaatctcccttaaagtacttattcagaccagaagaaattgaattgcttatatgtggaagccggaatctagatttccaagcactagaagaaactacagaatatgacggtggctataccagggactctgttctgattagggagttctgggaaatcgttcattcatttacagatgaacagaaaagactcttcttgcagtttacaacgggcacagacagagcacctgtgggaggactaggaaaattaaagatgattatagccaaaaatggcccagacacagaaaggttacctacatctcatacttgctttaatgtgcttttacttccggaatactcaagcaaagaaaaacttaaagagagattgttgaaggccatcacgtatgccaaaggatttggcatgctgtaaaacaaaacaaaacaaaataaaacaaaaaaaaggaaggaaaaaaaaagaaaaaatttaaaaaattttaaaaatataacgagggataaatttttggtggtgatagtgtcccagtacaaaaaggctgtaagatagtcaaccacagtagtcacctatgtctgtgcctcccttctttattggggacatgtgggctggaacagcagatttcagctacatatatgaacaaatcctttattattattataattatttttttgcgtgaaagtgttacatattctttcacttgtatgtacagagaggtttttctgaatatttattttaagggttaaatcacttttgcttgtgtttattactgcttgaggttgagccttttgagtatttaaaaaatatataccaacagaactactctcccaaggaaaatattgccaccatttgtagaccacgtaaccttcaagtatgtgctacttttttgtccctgtatctaactcaaatcaggaactgtattttttttaatgatttgcttttgaaacttgaagtcttgaaaacagtgtgatgcaattactgctgttctagcccccaaagagttttctgtgcaaaatcttgagaatcaatcaataaagaaagatggaaggaagggagaaattggaatgttttaactgcagccctcagaactttagtaacagcacaacaaattaaaaacaaaaacaactcatgccacagtatgtcgtcttcatgtgtcttgcaatgaactgtttcagtagccaatcctctttcttagtatatgaaaggacagggatttttgttcttgttgttctcgttgttgttttaagtttactggggaaagtgcatttggccaaatgaaatggtagtcaagcctattgcaacaaagttaggaagtttgttgtttgtttattataaacaaaaagcatgtgaaagtgcacttaagatagagtttttattaattacttacttattacctagattttaaatagacaatccaaagtctccccttcgtgttgccatcatcttgttgaatcagccattttatcgaggcacgtgatcagtgttgcaacataatgaaaaagatggctactgtgccttgtgttacttaatcatacagtaagctgacctggaaatgaatgaaactattactcctaagaattacattgtatagccccacagattaaatttaattaattaattcaaaacatgttaaacgttactttcatgtactatggaaaagtacaagtaggtttacattactgatttccagaagtaagtagtttcccctttcctagtcttctgtgtatgtgatgttgttaatttcttttattgcattataaaataaaaggattatgtatttttaactaaggtgagacattgatatatccttttgctacaagctatagctaatgtgctgagcttgtgccttggtgattgattgattgattgactgattgttttaactgattactgtagatcaacctgatgatttgtttgtttgaaattggcaggaaaaatgcagctttcaaatcattggggggagaaaaaggatgtctttcaggattattttaattaatttttttcataattgagacagaactgtttgttatgtaccataatgctaaataaaactgtggcacttttcaccataatttaatttagtggaaaaagaagacaatgctttccatattgtgataaggtaacatggggtttttctgggccagcctttagaacactgttagggtacatacgctaccttgatgaaagggaccttcgtgcaactgtagtcatcttaaaggcttctcatccactgtgcttcttaatgtgtaattaaagtgaggagaaattaaatactctgagggcgttttatataataaattcgtgaagaaa

SEQ ID NO: 127 - DNA, 5075 bp, Homo sapiens
  source 1..5075: mol_type = genomic DNA
cggctggcgacgaacgccgggatttcggcggccccggcgctccctttcccggcctcgttttccggataaggaagcgcgggtcccgcatgagccccggcggtggcggcagcgaaagagaacgaggcggtggcgggcggaggcggcgggcgagggcgactacgaccagtgaggcggccgccgcagcccaggcgcgggggcgacgacaggttaaaaatctgtaagagcctgattttagaattcaccagctcctcagaagtttggcgaaatatgagttattaagcctacgctcagatcaaggtagcagctagactggtgtgacaacctgtttttaatcagtgactcaaagctgtgatcaccctgatgtcaccgaatggccacagcttgtaaaagtgccagcaggtttattttttgttttgcaagccagctctgcctccttacagtatgacatctgatgctggagggtcgcactttcaaaaatgagtcagctggtacatggggttatcatcaatttttagctcttctgtctgggagatacaagtttggaagcaatcttggggtacttacccacaaggctggtggagaccagatcaggagaacctcagtctgacgacattgaagctagccgaatgaagcgagcagctgcaaagcatctaatagaacgctactaccaccagttaactgagggctgtggaaatgaagcctgcacgaatgagttttgtgcttcctgtccaacttttcttcgtatggataataatgcagcagctattaaagccctcgagctttataagattaatgcaaaactctgtgatcctcatccctccaagaaaggagcaagctcagcttaccttgagaactcgaaaggtgcccccaacaactcctgctctgagataaaaatgaacaagaaaggcgctagaattgattttaaagatgtgacttacttaacagaagagaaggtatatgaaattcttgaattatgtagagaaagagaggattattcccctttaatccgtgttattggaagagttttttctagtgctgaggcattggtacagagcttccggaaagttaaacaacacaccaaggaagaactgaaatctcttcaagcaaaagatgaagacaaagatgaagatgaaaaggaaaaagctgcatgttctgctgctgctatggaagaagactcagaagcatcttcctcaaggataggtgatagctcacagggagacaacaatttgcaaaaattaggccctgatgatgtgtctgtggatattgatgccattagaagggtctacaccagattgctctctaatgaaaaaattgaaactgcctttctcaatgcacttgtatatttgtcacctaacgtggaatgtgacttgacgtatcacaatgtatactctcgagatcctaattatctgaatttgttcattatcgtaatggagaatagaaatctccacagtcctgaatatctggaaatggctttgccattattttgcaaagcgatgagcaagctaccccttgcagcccaaggaaaactgatcagactgtggtctaaatacaatgcagaccagattcggagaatgatggagacatttcagcaacttattacttataaagtcataagcaatgaatttaacagtcgaaatctagtgaatgatgatgatgccattgttgctgcttcgaagtgcttgaaaatggtttactatgcaaatgtagtgggaggggaagtggacacaaatcacaatgaagaagatgatgaagagcccatccctgagtccagcgagctgacacttcaggaacttttgggagaagaaagaagaaacaagaaaggtcctcgagtggaccccctggaaactgaacttggtgttaaaaccctggattgtcgaaaaccacttatcccttttgaagagtttattaatgaaccactgaatgaggttctagaaatggataaagattatacttttttcaaagtagaaacagagaacaaattctcttttatgacatgtccctttatattgaatgctgtcacaaagaatttgggattatattatgacaatagaattcgcatgtacagtgaacgaagaatcactgttctctacagcttagttcaaggacagcagttgaatccatatttgagactcaaagttagacgtgaccatatcatagatgatgcacttgtccggctagagatgatcgctatggaaaatcctgcagacttgaagaagcagttgtatgtggaatttgaaggagaacaaggagttgatgagggaggtgtttccaaagaattttttcagctggttgtggaggaaatcttcaatccagatattggtatgttcacatacgatgaatctacaaaattgttttggtttaatccatcttcttttgaaactgagggtcagtttactctgattggcatagtactgggtctggctatttacaataactgtatactggatgtacattttcccatggttgtctacaggaagctaatggggaaaaaaggaacttttcgtgacttgggagactctcacccagttctatatcagagtttaaaagatttattggagtatgaagggaatgtggaagatgacatgatgatcactttccagatatcacagacagatctttttggtaacccaatgatgtatgatctaaaggaaaatggtgataaaattccaattacaaatgaaaacaggaaggaatttgtcaatctttattctgactacattctcaataaatcagtagaaaaacagttcaaggcttttcggagaggttttcatatggtgaccaatgaatctcccttaaagtacttattcagaccagaagaaattgaattgcttatatgtggaagccggaatctagatttccaagcactagaagaaactacagaatatgacggtggctataccagggactctgttctgattagggagttctgggaaatcgttcattcatttacagatgaacagaaaagactcttcttgcagtttacaacgggcacagacagagcacctgtgggaggactaggaaaattaaagatgattatagccaaaaatggcccagacacagaaaggttacctacatctcatacttgctttaatgtgcttttacttccggaatactcaagcaaagaaaaacttaaagagagattgttgaaggccatcacgtatgccaaaggatttggcatgctgtaaaacaaaacaaaacaaaataaaacaaaaaaaaggaaggaaaaaaaaagaaaaaatttaaaaaattttaaaaatataacgagggataaatttttggtggtgatagtgtcccagtacaaaaaggctgtaagatagtcaaccacagtagtcacctatgtctgtgcctcccttctttattggggacatgtgggctggaacagcagatttcagctacatatatgaacaaatcctttattattattataattatttttttgcgtgaaagtgttacatattctttcacttgtatgtacagagaggtttttctgaatatttattttaagggttaaatcacttttgcttgtgtttattactgcttgaggttgagccttttgagtatttaaaaaatatataccaacagaactactctcccaaggaaaatattgccaccatttgtagaccacgtaaccttcaagtatgtgctacttttttgtccctgtatctaactcaaatcaggaactgtattttttttaatgatttgcttttgaaacttgaagtcttgaaaacagtgtgatgcaattactgctgttctagcccccaaagagttttctgtgcaaaatcttgagaatcaatcaataaagaaagatggaaggaagggagaaattggaatgttttaactgcagccctcagaactttagtaacagcacaacaaattaaaaacaaaaacaactcatgccacagtatgtcgtcttcatgtgtcttgcaatgaactgtttcagtagccaatcctctttcttagtatatgaaaggacagggatttttgttcttgttgttctcgttgttgttttaagtttactggggaaagtgcatttggccaaatgaaatggtagtcaagcctattgcaacaaagttaggaagtttgttgtttgtttattataaacaaaaagcatgtgaaagtgcacttaagatagagtttttattaattacttacttattacctagattttaaatagacaatccaaagtctccccttcgtgttgccatcatcttgttgaatcagccattttatcgaggcacgtgatcagtgttgcaacataatgaaaaagatggctactgtgccttgtgttacttaatcatacagtaagctgacctggaaatgaatgaaactattactcctaagaattacattgtatagccccacagattaaatttaattaattaattcaaaacatgttaaacgttactttcatgtactatggaaaagtacaagtaggtttacattactgatttccagaagtaagtagtttcccctttcctagtcttctgtgtatgtgatgttgttaatttcttttattgcattataaaataaaaggattatgtatttttaactaaggtgagacattgatatatccttttgctacaagctatagctaatgtgctgagcttgtgccttggtgattgattgattgattgactgattgttttaactgattactgtagatcaacctgatgatttgtttgtttgaaattggcaggaaaaatgcagctttcaaatcattggggggagaaaaaggatgtctttcaggattattttaattaatttttttcataattgagacagaactgtttgttatgtaccataatgctaaataaaactgtggcacttttcaccataatttaatttagtggaaaaagaagacaatgctttccatattgtgataaggtaacatggggtttttctgggccagcctttagaacactgttagggtacatacgctaccttgatgaaagggaccttcgtgcaactgtagtcatcttaaaggcttctcatccactgtgcttcttaatgtgtaattaaagtgaggagaaattaaatactctgagggcgttttatataataaattcgtgaagaaa

SEQ ID NO: 128 - DNA, 5025 bp, Homo sapiens
  source 1..5025: mol_type = genomic DNA
agtcctcccgtcttgcgccgcggccgcgagatccgtgtgtctcccaagatggtggcgctgggctcggggtgactacaggagacgacggggccttttcccttcgccaggacccgacacaccaggcttcgctcgctcgcgcacccctccgccgcgtagccatccgccagcgcgggcgcccgccatccgccgcctacttacgcttcacctctgccgacccggcgcgctcggctgcgggcggcggcgcctccttcggctcctcctcggaatagctcgcggcctgtagcccctggcaggagggcccctcagccccccggtgtggacaggcagcggcggctggcgacgaacgccgggatttcggcggccccggcgctccctttcccggcctcgttttccggataaggaagcgcgggtcccgcatgagccccggcggtggcggcagcgaaagagaacgaggcggtggcgggcggaggcggcgggcgagggcgactacgaccagtgaggcggccgccgcagcccaggcgcgggggcgacgacagatcaggagaacctcagtctgacgacattgaagctagccgaatgaagcgagcagctgcaaagcatctaatagaacgctactaccaccagttaactgagggctgtggaaatgaagcctgcacgaatgagttttgtgcttcctgtccaacttttcttcgtatggataataatgcagcagctattaaagccctcgagctttataagattaatgcaaaactctgtgatcctcatccctccaagaaaggagcaagctcagcttaccttgagaactcgaaaggtgcccccaacaactcctgctctgagataaaaatgaacaagaaaggcgctagaattgattttaaagatgtgacttacttaacagaagagaaggtatatgaaattcttgaattatgtagagaaagagaggattattcccctttaatccgtgttattggaagagttttttctagtgctgaggcattggtacagagcttccggaaagttaaacaacacaccaaggaagaactgaaatctcttcaagcaaaagatgaagacaaagatgaagatgaaaaggaaaaagctgcatgttctgctgctgctatggaagaagactcagaagcatcttcctcaaggataggtgatagctcacagggagacaacaatttgcaaaaattaggccctgatgatgtgtctgtggatattgatgccattagaagggtctacaccagattgctctctaatgaaaaaattgaaactgcctttctcaatgcacttgtatatttgtcacctaacgtggaatgtgacttgacgtatcacaatgtatactctcgagatcctaattatctgaatttgttcattatcgtaatggagaatagaaatctccacagtcctgaatatctggaaatggctttgccattattttgcaaagcgatgagcaagctaccccttgcagcccaaggaaaactgatcagactgtggtctaaatacaatgcagaccagattcggagaatgatggagacatttcagcaacttattacttataaagtcataagcaatgaatttaacagtcgaaatctagtgaatgatgatgatgccattgttgctgcttcgaagtgcttgaaaatggtttactatgcaaatgtagtgggaggggaagtggacacaaatcacaatgaagaagatgatgaagagcccatccctgagtccagcgagctgacacttcaggaacttttgggagaagaaagaagaaacaagaaaggtcctcgagtggaccccctggaaactgaacttggtgttaaaaccctggattgtcgaaaaccacttatcccttttgaagagtttattaatgaaccactgaatgaggttctagaaatggataaagattatacttttttcaaagtagaaacagagaacaaattctcttttatgacatgtccctttatattgaatgctgtcacaaagaatttgggattatattatgacaatagaattcgcatgtacagtgaacgaagaatcactgttctctacagcttagttcaaggacagcagttgaatccatatttgagactcaaagttagacgtgaccatatcatagatgatgcacttgtccggctagagatgatcgctatggaaaatcctgcagacttgaagaagcagttgtatgtggaatttgaaggagaacaaggagttgatgagggaggtgtttccaaagaattttttcagctggttgtggaggaaatcttcaatccagatattggtatgttcacatacgatgaatctacaaaattgttttggtttaatccatcttcttttgaaactgagggtcagtttactctgattggcatagtactgggtctggctatttacaataactgtatactggatgtacattttcccatggttgtctacaggaagctaatggggaaaaaaggaacttttcgtgacttgggagactctcacccagttctatatcagagtttaaaagatttattggagtatgaagggaatgtggaagatgacatgatgatcactttccagatatcacagacagatctttttggtaacccaatgatgtatgatctaaaggaaaatggtgataaaattccaattacaaatgaaaacaggaaggaatttgtcaatctttattctgactacattctcaataaatcagtagaaaaacagttcaaggcttttcggagaggttttcatatggtgaccaatgaatctcccttaaagtacttattcagaccagaagaaattgaattgcttatatgtggaagccggaatctagatttccaagcactagaagaaactacagaatatgacggtggctataccagggactctgttctgattagggagttctgggaaatcgttcattcatttacagatgaacagaaaagactcttcttgcagtttacaacgggcacagacagagcacctgtgggaggactaggaaaattaaagatgattatagccaaaaatggcccagacacagaaaggttacctacatctcatacttgctttaatgtgcttttacttccggaatactcaagcaaagaaaaacttaaagagagattgttgaaggccatcacgtatgccaaaggatttggcatgctgtaaaacaaaacaaaacaaaataaaacaaaaaaaaggaaggaaaaaaaaagaaaaaatttaaaaaattttaaaaatataacgagggataaatttttggtggtgatagtgtcccagtacaaaaaggctgtaagatagtcaaccacagtagtcacctatgtctgtgcctcccttctttattggggacatgtgggctggaacagcagatttcagctacatatatgaacaaatcctttattattattataattatttttttgcgtgaaagtgttacatattctttcacttgtatgtacagagaggtttttctgaatatttattttaagggttaaatcacttttgcttgtgtttattactgcttgaggttgagccttttgagtatttaaaaaatatataccaacagaactactctcccaaggaaaatattgccaccatttgtagaccacgtaaccttcaagtatgtgctacttttttgtccctgtatctaactcaaatcaggaactgtattttttttaatgatttgcttttgaaacttgaagtcttgaaaacagtgtgatgcaattactgctgttctagcccccaaagagttttctgtgcaaaatcttgagaatcaatcaataaagaaagatggaaggaagggagaaattggaatgttttaactgcagccctcagaactttagtaacagcacaacaaattaaaaacaaaaacaactcatgccacagtatgtcgtcttcatgtgtcttgcaatgaactgtttcagtagccaatcctctttcttagtatatgaaaggacagggatttttgttcttgttgttctcgttgttgttttaagtttactggggaaagtgcatttggccaaatgaaatggtagtcaagcctattgcaacaaagttaggaagtttgttgtttgtttattataaacaaaaagcatgtgaaagtgcacttaagatagagtttttattaattacttacttattacctagattttaaatagacaatccaaagtctccccttcgtgttgccatcatcttgttgaatcagccattttatcgaggcacgtgatcagtgttgcaacataatgaaaaagatggctactgtgccttgtgttacttaatcatacagtaagctgacctggaaatgaatgaaactattactcctaagaattacattgtatagccccacagattaaatttaattaattaattcaaaacatgttaaacgttactttcatgtactatggaaaagtacaagtaggtttacattactgatttccagaagtaagtagtttcccctttcctagtcttctgtgtatgtgatgttgttaatttcttttattgcattataaaataaaaggattatgtatttttaactaaggtgagacattgatatatccttttgctacaagctatagctaatgtgctgagcttgtgccttggtgattgattgattgattgactgattgttttaactgattactgtagatcaacctgatgatttgtttgtttgaaattggcaggaaaaatgcagctttcaaatcattggggggagaaaaaggatgtctttcaggattattttaattaatttttttcataattgagacagaactgtttgttatgtaccataatgctaaataaaactgtggcacttttcaccataatttaatttagtggaaaaagaagacaatgctttccatattgtgataaggtaacatggggtttttctgggccagcctttagaacactgttagggtacatacgctaccttgatgaaagggaccttcgtgcaactgtagtcatcttaaaggcttctcatccactgtgcttcttaatgtgtaattaaagtgaggagaaattaaatactctgagggcgttttatataataaattcgtgaagaaa

SEQ ID NO: 129 - DNA, 3176 bp, Homo sapiens
  source 1..3176: mol_type = genomic DNA
cgactacgaccagtgaggcggccgccgcagcccaggcgcgggggcgacgacaggttaaaaatctgtaagagcctgattttagaattcaccagctcctcagaagtttggcgaaatatgagttattaagcctacgctcagatcaaggtagcagctagactggtgtgacaacctgtttttaatcagtgactcaaagctgtgatcaccctgatgtcaccgaatggccacagcttgtaaaagagagttacagtggaggtaaaaggagtggcttgcaggatggagaagctgcaccagtgttattggaagtgagccaccatttgaatttgctagctcatgctgcagtattcagattatgccagcaggtttattttttgttttgcaagccagctctgcctccttacagtatgacatctgatgctggagggtcgcactttcaaaaatgagtcagctggtacatggggttatcatcaatttttagctcttctgtctgggagatacaagtttggaagcaatcttggggtacttacccacaaggctggtggagaccagatcaggagaacctcagtctgacgacattgaagctagccgaatgaagcgagcagctgcaaagcatctaatagaacgctactaccaccagttaactgagggctgtggaaatgaagcctgcacgaatgagttttgtgcttcctgtccaacttttcttcgtatggataataatgcagcagctattaaagccctcgagctttataagattaatgcaaaactctgtgatcctcatccctccaagaaaggagcaagctcagcttaccttgagaactcgaaaggtgcccccaacaactcctgctctgagataaaaatgaacaagaaaggcgctagaattgattttaaagatgtgacttacttaacagaagagaaggtatatgaaattcttgaattatgtagagaaagagaggattattcccctttaatccgtgttattggaagagttttttctagtgctgaggcattggtacagagcttccggaaagttaaacaacacaccaaggaagaactgaaatctcttcaagcaaaagatgaagacaaagatgaagatgaaaaggaaaaagctgcatgttctgctgctgctatggaagaagactcagaagcatcttcctcaaggataggtgatagctcacagggagacaacaatttgcaaaaattaggccctgatgatgtgtctgtggatattgatgccattagaagggtctacaccagattgctctctaatgaaaaaattgaaactgcctttctcaatgcacttgtatatttgtcacctaacgtggaatgtgacttgacgtatcacaatgtatactctcgagatcctaattatctgaatttgttcattatcgtaatggagaatagaaatctccacagtcctgaatatctggaaatggctttgccattattttgcaaagcgatgagcaagctaccccttgcagcccaaggaaaactgatcagactgtggtctaaatacaatgcagaccagattcggagaatgatggagacatttcagcaacttattacttataaagtcataagcaatgaatttaacagtcgaaatctagtgaatgatgatgatgccattgttgctgcttcgaagtgcttgaaaatggtttactatgcaaatgtagtgggaggggaagtggacacaaatcacaatgaagaagatgatgaagagcccatccctgagtccagcgagctgacacttcaggaacttttgggagaagaaagaagaaacaagaaaggtcctcgagtggaccccctggaaactgaacttggtgttaaaaccctggattgtcgaaaaccacttatcccttttgaagagtttattaatgaaccactgaatgaggttctagaaatggataaagattatacttttttcaaagtagaaacagagaacaaattctcttttatgacatgtccctttatattgaatgctgtcacaaagaatttgggattatattatgacaatagaattcgcatgtacagtgaacgaagaatcactgttctctacagcttagttcaaggacagcagttgaatccatatttgagactcaaagttagacgtgaccatatcatagatgatgcacttgtccggctagagatgatcgctatggaaaatcctgcagacttgaagaagcagttgtatgtggaatttgaaggagaacaaggagttgatgagggaggtgtttccaaagaattttttcagctggttgtggaggaaatcttcaatccagatattggtatgttcacatacgatgaatctacaaaattgttttggtttaatccatcttcttttgaaactgagggtcagtttactctgattggcatagtactgggtctggctatttacaataactgtatactggatgtacattttcccatggttgtctacaggaagctaatggggaaaaaaggaacttttcgtgacttgggagactctcacccagttctatatcagagtttaaaagatttattggagtatgaagggaatgtggaagatgacatgatgatcactttccagatatcacagacagatctttttggtaacccaatgatgtatgatctaaaggaaaatggtgataaaattccaattacaaatgaaaacaggaaggaatttgtcaatctttattctgactacattctcaataaatcagtagaaaaacagttcaaggcttttcggagaggttttcatatggtgaccaatgaatctcccttaaagtacttattcagaccagaagaaattgaattgcttatatgtggaagccggaatctagatttccaagcactagaagaaactacagaatatgacggtggctataccagggactctgttctgattagggagttctgggaaatcgttcattcatttacagatgaacagaaaagactcttcttgcagtttacaacgggcacagacagagcacctgtgggaggactaggaaaattaaagatgattatagccaaaaatggcccagacacagaaaggttacctacatctcatacttgctttaatgtgcttttacttccggaatactcaagcaaagaaaaacttaaagagagattgttgaaggccatcacgtatgccaaaggatttggcatgctgtaaaacaaaacaaaacaaaataaaacaaaaaaaa

SEQ ID NO: 130 - DNA, 2986 bp, Homo sapiens
  source 1..2986: mol_type = genomic DNA
gcggccgccgcagcccaggcgcgggggcgacgacaggttaaaaatctgtaagagcctgattttagaattcaccagctcctcagaagtttggcgaaatatgagttattaagcctacgctcagatcaaggtagcagctagactggtgtgacaacctgtttttaatcagtgactcaaagctgtgatcaccctgatgtcaccgaatggccacagcttgtaaaagagagttacagtggaggtaaaaggagtggcttgcaggatggagaagctgcaccagtgttattggaactcttctgtctgggagatacaagtttggaagcaatcttggggtacttacccacaaggctggtggagaccagatcaggagaacctcagtctgacgacattgaagctagccgaatgaagcgagcagctgcaaagcatctaatagaacgctactaccaccagttaactgagggctgtggaaatgaagcctgcacgaatgagttttgtgcttcctgtccaacttttcttcgtatggataataatgcagcagctattaaagccctcgagctttataagattaatgcaaaactctgtgatcctcatccctccaagaaaggagcaagctcagcttaccttgagaactcgaaaggtgcccccaacaactcctgctctgagataaaaatgaacaagaaaggcgctagaattgattttaaagatgtgacttacttaacagaagagaaggtatatgaaattcttgaattatgtagagaaagagaggattattcccctttaatccgtgttattggaagagttttttctagtgctgaggcattggtacagagcttccggaaagttaaacaacacaccaaggaagaactgaaatctcttcaagcaaaagatgaagacaaagatgaagatgaaaaggaaaaagctgcatgttctgctgctgctatggaagaagactcagaagcatcttcctcaaggataggtgatagctcacagggagacaacaatttgcaaaaattaggccctgatgatgtgtctgtggatattgatgccattagaagggtctacaccagattgctctctaatgaaaaaattgaaactgcctttctcaatgcacttgtatatttgtcacctaacgtggaatgtgacttgacgtatcacaatgtatactctcgagatcctaattatctgaatttgttcattatcgtaatggagaatagaaatctccacagtcctgaatatctggaaatggctttgccattattttgcaaagcgatgagcaagctaccccttgcagcccaaggaaaactgatcagactgtggtctaaatacaatgcagaccagattcggagaatgatggagacatttcagcaacttattacttataaagtcataagcaatgaatttaacagtcgaaatctagtgaatgatgatgatgccattgttgctgcttcgaagtgcttgaaaatggtttactatgcaaatgtagtgggaggggaagtggacacaaatcacaatgaagaagatgatgaagagcccatccctgagtccagcgagctgacacttcaggaacttttgggagaagaaagaagaaacaagaaaggtcctcgagtggaccccctggaaactgaacttggtgttaaaaccctggattgtcgaaaaccacttatcccttttgaagagtttattaatgaaccactgaatgaggttctagaaatggataaagattatacttttttcaaagtagaaacagagaacaaattctcttttatgacatgtccctttatattgaatgctgtcacaaagaatttgggattatattatgacaatagaattcgcatgtacagtgaacgaagaatcactgttctctacagcttagttcaaggacagcagttgaatccatatttgagactcaaagttagacgtgaccatatcatagatgatgcacttgtccggctagagatgatcgctatggaaaatcctgcagacttgaagaagcagttgtatgtggaatttgaaggagaacaaggagttgatgagggaggtgtttccaaagaattttttcagctggttgtggaggaaatcttcaatccagatattggtatgttcacatacgatgaatctacaaaattgttttggtttaatccatcttcttttgaaactgagggtcagtttactctgattggcatagtactgggtctggctatttacaataactgtatactggatgtacattttcccatggttgtctacaggaagctaatggggaaaaaaggaacttttcgtgacttgggagactctcacccagttctatatcagagtttaaaagatttattggagtatgaagggaatgtggaagatgacatgatgatcactttccagatatcacagacagatctttttggtaacccaatgatgtatgatctaaaggaaaatggtgataaaattccaattacaaatgaaaacaggaaggaatttgtcaatctttattctgactacattctcaataaatcagtagaaaaacagttcaaggcttttcggagaggttttcatatggtgaccaatgaatctcccttaaagtacttattcagaccagaagaaattgaattgcttatatgtggaagccggaatctagatttccaagcactagaagaaactacagaatatgacggtggctataccagggactctgttctgattagggagttctgggaaatcgttcattcatttacagatgaacagaaaagactcttcttgcagtttacaacgggcacagacagagcacctgtgggaggactaggaaaattaaagatgattatagccaaaaatggcccagacacagaaaggttacctacatctcatacttgctttaatgtgcttttacttccggaatactcaagcaaagaaaaacttaaagagagattgttgaaggccatcacgtatgccaaaggatttggcatgctgtaaaacaaaacaaaacaaaataaaacaaaaaaaa

SEQ ID NO: 131 - DNA, 9352 bp, Homo sapiens
  source 1..9352: mol_type = genomic DNA
gcggccgcgagatccgtgtgtctcccaagatggtggcgctgggctcggggtgactacaggagacgacggggccttttcccttcgccaggacccgacacaccaggcttcgctcgctcgcgcacccctccgccgcgtagccatccgccagcgcgggcgcccgccatccgccgcctacttacgcttcacctctgccgacccggcgcgctcggctgcgggcggcggcgcctccttcggctcctcctcggaatagctcgcggcctgtagcccctggcaggagggcccctcagccccccggtgtggacaggcagcggcggctggcgacgaacgccgggatttcggcggccccggcgctccctttcccggcctcgttttccggataaggaagcgcgggtcccgcatgagccccggcggtggcggcagcgaaagagaacgaggcggtggcgggcggaggcggcgggcgagggcgactacgaccagtgaggcggccgccgcagcccaggcgcgggggcgacgacagatcaggagaacctcagtctgacgacattgaagctagccgaatgaagcgagcagctgcaaagcatctaatagaacgctactaccaccagttaactgagggctgtggaaatgaagcctgcacgaatgagttttgtgcttcctgtccaacttttcttcgtatggataataatgcagcagctattaaagccctcgagctttataagattaatgcaaaactctgtgatcctcatccctccaagaaaggagcaagctcagcttaccttgagaactcgaaaggtgcccccaacaactcctgctctgagataaaaatgaacaagaaaggcgctagaattgattttaaagatgtgacttacttaacagaagagaaggtatatgaaattcttgaattatgtagagaaagagaggattattcccctttaatccgtgttattggaagagttttttctagtgctgaggcattggtacagagcttccggaaagttaaacaacacaccaaggaagaactgaaatctcttcaagcaaaagatgaagacaaagatgaagatgaaaaggaaaaagctgcatgttctgctgctgctatggaagaagactcagaagcatcttcctcaaggataggtgatagctcacagggagacaacaatttgcaaaaattaggccctgatgatgtgtctgtggatattgatgccattagaagggtctacaccagattgctctctaatgaaaaaattgaaactgcctttctcaatgcacttgtatatttgtcacctaacgtggaatgtgacttgacgtatcacaatgtatactctcgagatcctaattatctgaatttgttcattatcgtaatggagaatagaaatctccacagtcctgaatatctggaaatggctttgccattattttgcaaagcgatgagcaagctaccccttgcagcccaaggaaaactgatcagactgtggtctaaatacaatgcagaccagattcggagaatgatggagacatttcagcaacttattacttataaagtcataagcaatgaatttaacagtcgaaatctagtgaatgatgatgatgccattgttgctgcttcgaagtgcttgaaaatggtttactatgcaaatgtagtgggaggggaagtggacacaaatcacaatgaagaagatgatgaagagcccatccctgagtccagcgagctgacacttcaggaacttttgggagaagaaagaagaaacaagaaaggtcctcgagtggaccccctggaaactgaacttggtgttaaaaccctggattgtcgaaaaccacttatcccttttgaagagtttattaatgaaccactgaatgaggttctagaaatggataaagattatacttttttcaaagtagaaacagagaacaaattctcttttatgacatgtccctttatattgaatgctgtcacaaagaatttgggattatattatgacaatagaattcgcatgtacagtgaacgaagaatcactgttctctacagcttagttcaaggacagcagttgaatccatatttgagactcaaagttagacgtgaccatatcatagatgatgcacttgtccggctagagatgatcgctatggaaaatcctgcagacttgaagaagcagttgtatgtggaatttgaaggagaacaaggagttgatgagggaggtgtttccaaagaattttttcagctggttgtggaggaaatcttcaatccagatattggtatgttcacatacgatgaatctacaaaattgttttggtttaatccatcttcttttgaaactgagggtcagtttactctgattggcatagtactgggtctggctatttacaataactgtatactggatgtacattttcccatggttgtctacaggaagctaatggggaaaaaaggaacttttcgtgacttgggagactctcacccagttctatatcagagtttaaaagatttattggagtatgaagggaatgtggaagatgacatgatgatcactttccagatatcacagacagatctttttggtaacccaatgatgtatgatctaaaggaaaatggtgataaaattccaattacaaatgaaaacaggaaggaatttgtcaatctttattctgactacattctcaataaatcagtagaaaaacagttcaaggcttttcggagaggttttcatatggtgaccaatgaatctcccttaaagtacttattcagaccagaagaaattgaattgcttatatgtggaagccggaatctagatttccaagcactagaagaaactacagaatatgacggtggctataccagggactctgttctgattagggagttctgggaaatcgttcattcatttacagatgaacagaaaagactcttcttgcagtttacaacgggcacagacagagcacctgtgggaggactaggaaaattaaagatgattatagccaaaaatggcccagacacagaaaggtaggtaattattaacttgtgactgtatacctaccgaaaaccttgcattcctcgtcacatacatatgaactgtctttatagtttctgagcacattcgtgattttatatacaaatccccaaatcatattagacaattgagaaaatactttgctgtcattgtgtgaggaaacttttaagaaattgccctagttaaaaattattatggggctcacattggtttggaatcaaattagtgtgattcatttacttttttgattcccagcttgttaattgaaagccatataacatgatcatctatttagaatggttacattgaggctcggaagattatcatttgattgtgctagaatcctgttatcaaatcattttcttagtcatattgccagcagtgtttctaataagcatttaagagcacacactttgcagtcttgtaaaacaggtttgagtattttctccaccttagaggaagttacttgacttctcagtgacctaacctctaaagtgcatttactgatgtcctctctgtggttttgttgtggaaagatttagttaaatgaactgtaagaattcagtacctaaaatggtatctgttatgtagtaaaaactcaatggatacagtatcttatcatcgtcactagctttgagtaatttataggataaaggcaacttggtagttacacaacaaaaagtttatgatttgcattaatgtatagtttgcattgcagaccgtctcaactatatacaatctaaaaataggagcatttaattctaagtgtatttcccatgacttacagttttcctgtttttttccccttttctctatttaggttacctacatctcatacttgctttaatgtgcttttacttccggaatactcaagcaaagaaaaacttaaagagagattgttgaaggccatcacgtatgccaaaggatttggcatgctgtaaaacaaaacaaaacaaaataaaacaaaaaaaaggaaggaaaaaaaaagaaaaaatttaaaaaattttaaaaatataacgagggataaatttttggtggtgatagtgtcccagtacaaaaaggctgtaagatagtcaaccacagtagtcacctatgtctgtgcctcccttctttattggggacatgtgggctggaacagcagatttcagctacatatatgaacaaatcctttattattattataattatttttttgcgtgaaagtgttacatattctttcacttgtatgtacagagaggtttttctgaatatttattttaagggttaaatcacttttgcttgtgtttattactgcttgaggttgagccttttgagtatttaaaaaatatataccaacagaactactctcccaaggaaaatattgccaccatttgtagaccacgtaaccttcaagtatgtgctacttttttgtccctgtatctaactcaaatcaggaactgtattttttttaatgatttgcttttgaaacttgaagtcttgaaaacagtgtgatgcaattactgctgttctagcccccaaagagttttctgtgcaaaatcttgagaatcaatcaataaagaaagatggaaggaagggagaaattggaatgttttaactgcagccctcagaactttagtaacagcacaacaaattaaaaacaaaaacaactcatgccacagtatgtcgtcttcatgtgtcttgcaatgaactgtttcagtagccaatcctctttcttagtatatgaaaggacagggatttttgttcttgttgttctcgttgttgttttaagtttactggggaaagtgcatttggccaaatgaaatggtagtcaagcctattgcaacaaagttaggaagtttgttgtttgtttattataaacaaaaagcatgtgaaagtgcacttaagatagagtttttattaattacttacttattacctagattttaaatagacaatccaaagtctccccttcgtgttgccatcatcttgttgaatcagccattttatcgaggcacgtgatcagtgttgcaacataatgaaaaagatggctactgtgccttgtgttacttaatcatacagtaagctgacctggaaatgaatgaaactattactcctaagaattacattgtatagccccacagattaaatttaattaattaattcaaaacatgttaaacgttactttcatgtactatggaaaagtacaagtaggtttacattactgatttccagaagtaagtagtttcccctttcctagtcttctgtgtatgtgatgttgttaatttcttttattgcattataaaataaaaggattatgtatttttaactaaggtgagacattgatatatccttttgctacaagctatagctaatgtgctgagcttgtgccttggtgattgattgattgattgactgattgttttaactgattactgtagatcaacctgatgatttgtttgtttgaaattggcaggaaaaatgcagctttcaaatcattggggggagaaaaaggatgtctttcaggattattttaattaatttttttcataattgagacagaactgtttgttatgtaccataatgctaaataaaactgtggcacttttcaccataatttaatttagtggaaaaagaagacaatgctttccatattgtgataaggtaacatggggtttttctgggccagcctttagaacactgttagggtacatacgctaccttgatgaaagggaccttcgtgcaactgtagtcatcttaaaggcttctcatccactgtgcttcttaatgtgtaattaaagtgaggagaaattaaatactctgagggcgttttatataataaattcgtgaagaaatgtgtgctcttcagttctcaagttttattattatggtatttattaaagttctacaattgtaataacgtatccatatgacaagttttaaagtggtaattgaaataggttatcagatatagagttgttcacatcaagtagacttttaacagagtcagaatgaacctacccttaaaattttagagaaaaaaaatcgtcggttgcacagaatagctgctctagcttgcttaattatgccgggcatgttgtcactcctcttacttttgctgccttttcattactatttaatggaatgtccctgaacaataaggaagagcaaaacatagacattttgactacagtggatacttcctctaccccaaatgttatgttataaaagtactttttttgcccaggtactctattatatattttggttttctttgaattagacctcaatctccaggaagctctggagggaaaaaaaggaaccataaactaaagtaactggttttccaaataaatgtaaacttttttaaccttttattattatagaacatttcaaacatacataaaacatgaaaacagcctgcagccaaacttttctggaccttggcagctccagcaaatgagctggtcatcctaaccctggtttcctgagacaactacttttggggatgcttgcttgtatagggagatgatagatagatagatacatatcaaaaagaaacttgaaaaaggcttcgaacagaacttgccgatgttactcatccctcctcggtacagacattctgttagaacagatggttgtaatggggcagcatcactccctattcccattaaaaacatgaccattctgagatttcaggccccttcgaggaatttttctcaagaattccatacaaactgtcagaggaagaaatgtcgtcccaagactagtccctgtgtagtcttgatccctttacctgcttactgtaattttttttctctgactttccgccagtgtctaagggccatctgtacccctcccacccttccatgagccactgtataatccaaaaacacaccttccatttgctccctcacttgtctccttttacctcaacagtgttagtgtgtaaagaattgcctggggagggtagagggttttacaagtacagagtcccaagtcttttctcccctccccgttagtgggttggcatttattaataggcactgcaagattttgatgcaggtgtggggtagatatcactgtgaaaggctactaatgcatggtagtttcaccgaaagtacagtcttcaaggatccttataatctcctcattgccaaaatcagtaacatctataaccttgacaacaccctagcttgggctgttgcttctctggctacttgtttttccatcccagtttacccagattttagatggatactcctccaattctgcttaaagtccttacctgttcttgcccagttccctctagtcaacctcagtcactcccaaagattcttccccaatcccatatcttttgctcagacctctgtctctgggatttctttgttacctcatagtcagtagtcctaaaaacaaaattcttcatcttgcatctctatcgaccgaccattctttgtttctttttaagaaatgtaaccttcaccccaatcatcaaaatctctcattcctcaattgtcacaggttgtcacttctttccccctaaacctctcccatcattccttccttctttatactgcccttacaggtcctgatcctctgactcacccggacattcttagcagctgcctaatttcactccctgactctcatctccctcttccaatccttttcattgtgctagaacactatcttgctaattttaatatcctctgcattcagtgcctccacagattgccccctcactgacctttccaatttggccttgtgttacacactttcctcgctgcattcctacccagcatcttcacttgtcatatttctcaaatactcttcatgaccagatatttaaagtacctcatccatgaagacttcatcaacccccaaagtgcctccaatgcttccgtggtagcacagcataatggggtacatttcttagttgaacagtgaggagtcactgggattcttacagagtgtcttagggtctcctcttgatactctttccacatttcagttaaggaattttcttacatctttttttcttctaataacctttgcctggagtgtaagtaaattcatgatagagactgtcatttttaaaaaaaaaaacaaaccattttgcctttcacatgttattacctccatctttctgttatcttgtcagtgttgccacctaaatgattgaaaatgaccgagcatgcagtagaatgtagtgaagtttcctatttcatccattttttgcataagtgcattggtatctgtatatccatctgcccaagcaccagttgttgaaaagactattatttccccatgaatggtcctggtacccttgtcaaagaacagttgaccataaatataagactttctggattctcagtcttactccattgccctatatgtctgtcgttataccagcaccgcactgtcttgatggctgtagcttggtagtaagtttagatttgggatgtgcaagtcctccattttttttttttttttccccaaaatcattttgtctgttttgggtcccttgcattgcatatgaatttttatatgatcattgtgtcaattcctgcaaaacagctgggatcttgatagggatttagttgaattggtagataaatttgagaaataactgctattttaatggtgttaggttttctgttccatgactgtgggatgtctttgcatttgcttaggtctttatttcagtgatgttttagagatttcagtgtgcaagtcttgacgtctttaatttttttctaagtattttactgatgccactttaattatatgattattttctaatttttatttttgtattcatcactggtgttagaaataaaattaatttttgtatattgattttgtatattgtagcttttctaaaattctttttttgtcacttagtattttttgcatatgagatcatgcatctgtgaacagaaatacttttacttcttcctttccagtctagattcctattatttcattttcttgccttagtgtgctggctagcacctccagtacaatattggatagaagtgacaagagcagacatctttttcttgttcctgattttaaggggaaagcattcagtctttcaccattgagtatgatgttagctagctgtgggtttgcttcaagttgaggaaattcttttattaaacctagtttactgagtgttttttaatcaaaaaaaaaaaaaggaggggctgtgggttttgttaaatgcttcttctgtatcaagattttcatgttgttttgtcctttattaatatgttgtattaatggacttttgtatattgaattaactttgcattcctgggataatctcagttgtccatgctacataaaccttgttctatgctgctgga

SEQ ID NO: 132 - DNA, 5726 bp, Homo sapiens
  source 1..5726: mol_type = genomic DNA
agtacacagcagcactgtggctctggaccagcaaggagagtctcaagcatggggagttctgggaaatcgttcattcatttacagatgaacagaaaagactcttcttgcagtttacaacgggcacagacagagcacctgtgggaggactaggaaaattaaagatgattatagccaaaaatggcccagacacagaaaggttacctacatctcatacttgctttaatgtgcttttacttccggaatactcaagcaaagaaaaacttaaagagagattgttgaaggccatcacgtatgccaaaggatttggcatgctgtaaaacaaaacaaaacaaaataaaacaaaaaaaaggaaggaaaaaaaaagaaaaaatttaaaaaattttaaaaatataacgagggataaatttttggtggtgatagtgtcccagtacaaaaaggctgtaagatagtcaaccacagtagtcacctatgtctgtgcctcccttctttattggggacatgtgggctggaacagcagatttcagctacatatatgaacaaatcctttattattattataattatttttttgcgtgaaagtgttacatattctttcacttgtatgtacagagaggtttttctgaatatttattttaagggttaaatcacttttgcttgtgtttattactgcttgaggttgagccttttgagtatttaaaaaatatataccaacagaactactctcccaaggaaaatattgccaccatttgtagaccacgtaaccttcaagtatgtgctacttttttgtccctgtatctaactcaaatcaggaactgtattttttttaatgatttgcttttgaaacttgaagtcttgaaaacagtgtgatgcaattactgctgttctagcccccaaagagttttctgtgcaaaatcttgagaatcaatcaataaagaaagatggaaggaagggagaaattggaatgttttaactgcagccctcagaactttagtaacagcacaacaaattaaaaacaaaaacaactcatgccacagtatgtcgtcttcatgtgtcttgcaatgaactgtttcagtagccaatcctctttcttagtatatgaaaggacagggatttttgttcttgttgttctcgttgttgttttaagtttactggggaaagtgcatttggccaaatgaaatggtagtcaagcctattgcaacaaagttaggaagtttgttgtttgtttattataaacaaaaagcatgtgaaagtgcacttaagatagagtttttattaattacttacttattacctagattttaaatagacaatccaaagtctccccttcgtgttgccatcatcttgttgaatcagccattttatcgaggcacgtgatcagtgttgcaacataatgaaaaagatggctactgtgccttgtgttacttaatcatacagtaagctgacctggaaatgaatgaaactattactcctaagaattacattgtatagccccacagattaaatttaattaattaattcaaaacatgttaaacgttactttcatgtactatggaaaagtacaagtaggtttacattactgatttccagaagtaagtagtttcccctttcctagtcttctgtgtatgtgatgttgttaatttcttttattgcattataaaataaaaggattatgtatttttaactaaggtgagacattgatatatccttttgctacaagctatagctaatgtgctgagcttgtgccttggtgattgattgattgattgactgattgttttaactgattactgtagatcaacctgatgatttgtttgtttgaaattggcaggaaaaatgcagctttcaaatcattggggggagaaaaaggatgtctttcaggattattttaattaatttttttcataattgagacagaactgtttgttatgtaccataatgctaaataaaactgtggcacttttcaccataatttaatttagtggaaaaagaagacaatgctttccatattgtgataaggtaacatggggtttttctgggccagcctttagaacactgttagggtacatacgctaccttgatgaaagggaccttcgtgcaactgtagtcatcttaaaggcttctcatccactgtgcttcttaatgtgtaattaaagtgaggagaaattaaatactctgagggcgttttatataataaattcgtgaagaaatgtgtgctcttcagttctcaagttttattattatggtatttattaaagttctacaattgtaataacgtatccatatgacaagttttaaagtggtaattgaaataggttatcagatatagagttgttcacatcaagtagacttttaacagagtcagaatgaacctacccttaaaattttagagaaaaaaaatcgtcggttgcacagaatagctgctctagcttgcttaattatgccgggcatgttgtcactcctcttacttttgctgccttttcattactatttaatggaatgtccctgaacaataaggaagagcaaaacatagacattttgactacagtggatacttcctctaccccaaatgttatgttataaaagtactttttttgcccaggtactctattatatattttggttttctttgaattagacctcaatctccaggaagctctggagggaaaaaaaggaaccataaactaaagtaactggttttccaaataaatgtaaacttttttaaccttttattattatagaacatttcaaacatacataaaacatgaaaacagcctgcagccaaacttttctggaccttggcagctccagcaaatgagctggtcatcctaaccctggtttcctgagacaactacttttggggatgcttgcttgtatagggagatgatagatagatagatacatatcaaaaagaaacttgaaaaaggcttcgaacagaacttgccgatgttactcatccctcctcggtacagacattctgttagaacagatggttgtaatggggcagcatcactccctattcccattaaaaacatgaccattctgagatttcaggccccttcgaggaatttttctcaagaattccatacaaactgtcagaggaagaaatgtcgtcccaagactagtccctgtgtagtcttgatccctttacctgcttactgtaattttttttctctgactttccgccagtgtctaagggccatctgtacccctcccacccttccatgagccactgtataatccaaaaacacaccttccatttgctccctcacttgtctccttttacctcaacagtgttagtgtgtaaagaattgcctggggagggtagagggttttacaagtacagagtcccaagtcttttctcccctccccgttagtgggttggcatttattaataggcactgcaagattttgatgcaggtgtggggtagatatcactgtgaaaggctactaatgcatggtagtttcaccgaaagtacagtcttcaaggatccttataatctcctcattgccaaaatcagtaacatctataaccttgacaacaccctagcttgggctgttgcttctctggctacttgtttttccatcccagtttacccagattttagatggatactcctccaattctgcttaaagtccttacctgttcttgcccagttccctctagtcaacctcagtcactcccaaagattcttccccaatcccatatcttttgctcagacctctgtctctgggatttctttgttacctcatagtcagtagtcctaaaaacaaaattcttcatcttgcatctctatcgaccgaccattctttgtttctttttaagaaatgtaaccttcaccccaatcatcaaaatctctcattcctcaattgtcacaggttgtcacttctttccccctaaacctctcccatcattccttccttctttatactgcccttacaggtcctgatcctctgactcacccggacattcttagcagctgcctaatttcactccctgactctcatctccctcttccaatccttttcattgtgctagaacactatcttgctaattttaatatcctctgcattcagtgcctccacagattgccccctcactgacctttccaatttggccttgtgttacacactttcctcgctgcattcctacccagcatcttcacttgtcatatttctcaaatactcttcatgaccagatatttaaagtacctcatccatgaagacttcatcaacccccaaagtgcctccaatgcttccgtggtagcacagcataatggggtacatttcttagttgaacagtgaggagtcactgggattcttacagagtgtcttagggtctcctcttgatactctttccacatttcagttaaggaattttcttacatctttttttcttctaataacctttgcctggagtgtaagtaaattcatgatagagactgtcatttttaaaaaaaaaaacaaaccattttgcctttcacatgttattacctccatctttctgttatcttgtcagtgttgccacctaaatgattgaaaatgaccgagcatgcagtagaatgtagtgaagtttcctatttcatccattttttgcataagtgcattggtatctgtatatccatctgcccaagcaccagttgttgaaaagactattatttccccatgaatggtcctggtacccttgtcaaagaacagttgaccataaatataagactttctggattctcagtcttactccattgccctatatgtctgtcgttataccagcaccgcactgtcttgatggctgtagcttggtagtaagtttagatttgggatgtgcaagtcctccattttttttttttttttccccaaaatcattttgtctgttttgggtcccttgcattgcatatgaatttttatatgatcattgtgtcaattcctgcaaaacagctgggatcttgatagggatttagttgaattggtagataaatttgagaaataactgctattttaatggtgttaggttttctgttccatgactgtgggatgtctttgcatttgcttaggtctttatttcagtgatgttttagagatttcagtgtgcaagtcttgacgtctttaatttttttctaagtattttactgatgccactttaattatatgattattttctaatttttatttttgtattcatcactggtgttagaaataaaattaatttttgtatattgattttgtatattgtagcttttctaaaattctttttttgtcacttagtattttttgcatatgagatcatgcatctgtgaacagaaatacttttacttcttcctttccagtctagattcctattatttcattttcttgccttagtgtgctggctagcacctccagtacaatattggatagaagtgacaagagcagacatctttttcttgttcctgattttaaggggaaagcattcagtctttcaccattgagtatgatgttagctagctgtgggtttgcttcaagttgaggaaattcttttattaaacctagtttactgagtgttttttaatcaaaaaaaaaaaaaggaggggctgtgggttttgttaaatgcttcttctgtatcaagattttcatgttgttttgtcctttattaatatgttgtattaatggacttttgtatattgaattaactttgcattcctgggataatctcagttgtccatgctacataaaccttgttctatgctgctgga

SEQ ID NO: 133 - DNA, 4968 bp, Homo sapiens
  source 1..4968: mol_type = genomic DNA
ctgccgggatactcggcccgcccagccagtcctcccgtcttgcgccgcggccgcgagatccgtgtgtctcccaagatggtggcgctgggctcggggtgactacaggagacgacggggccttttcccttcgccaggacccgacacaccaggcttcgctcgctcgcgcacccctccgccgcgtagccatccgccagcgcgggcgcccgccatccgccgcctacttacgcttcacctctgccgacccggcgcgctcggctgcgggcggcggcgcctccttcggctcctcctcggaatagctcgcggcctgtagcccctggcaggagggcccctcagccccccggtgtggacaggcagcggcggctggcgacgaacgccgggatttcggcggccccggcgctccctttcccggcctcgttttccggataaggaagcgcgggtcccgcatgagccccggcggtggcggcagcgaaagagaacgaggcggtggcgggcggaggcggcgggcgagggcgactacgaccagtgaggcggccgccgcagcccaggcgcgggggcgacgacagatcaggagaacctcagtctgacgacattgaagctagccgaatgaagcgagcagctgcaaagcatctaatagaacgctactaccaccagttaactgagggctgtggaaatgaagcctgcacgaatgagttttgtgcttcctgtccaacttttcttcgtatggataataatgcagcagctattaaagccctcgagctttataagattaatgcaaaactctgtgatcctcatccctccaagaaaggagcaagctcagcttaccttgagaactcgaaaggtgcccccaacaactcctgctctgagataaaaatgaacaagaaaggcgctagaattgattttaaagatgtgacttacttaacagaagagaaggtatatgaaattcttgaattatgtagagaaagagaggattattcccctttaatccgtgttattggaagagttttttctagtgctgaggcattggtacagagcttccggaaagttaaacaacacaccaaggaagaactgaaatctcttcaagcaaaagatgaagacaaagatgaagatgaaaaggaaaaagctgcatgttctgctgctgctatggaagaagactcagaagcatcttcctcaaggataggtgatagctcacagggagacaacaatttgcaaaaattaggccctgatgatgtgtctgtggatattgatgccattagaagggtctacaccagattgctctctaatgaaaaaattgaaactgcctttctcaatgcacttgtatatttgtcacctaacgtggaatgtgacttgacgtatcacaatgtatactctcgagatcctaattatctgaatttgttcattatcgtaatggagaatagaaatctccacagtcctgaatatctggaaatggctttgccattattttgcaaagcgatgagcaagctaccccttgcagcccaaggaaaactgatcagactgtggtctaaatacaatgcagaccagattcggagaatgatggagacatttcagcaacttattacttataaagtcataagcaatgaatttaacagtcgaaatctagtgaatgatgatgatgccattgttgctgcttcgaagtgcttgaaaatggtttactatgcaaatgtagtgggaggggaagtggacacaaatcacaatgaagaagatgatgaagagcccatccctgagtccagcgagctgacacttcaggaacttttgggagaagaaagaagaaacaagaaaggtcctcgagtggaccccctggaaactgaacttggtgttaaaaccctggattgtcgaaaaccacttatcccttttgaagagtttattaatgaaccactgaatgaggttctagaaatggataaagattatacttttttcaaagtagaaacagagaacaaattctcttttatgacatgtccctttatattgaatgctgtcacaaagaatttgggattatattatgacaatagaattcgcatgtacagtgaacgaagaatcactgttctctacagcttagttcaaggacagcagttgaatccatatttgagactcaaagttagacgtgaccatatcatagatgatgcacttgtccggctagagatgatcgctatggaaaatcctgcagacttgaagaagcagttgtatgtggaatttgaaggagaacaaggagttgatgagggaggtgtttccaaagaattttttcagctggttgtggaggaaatcttcaatccagatattggtatgttcacatacgatgaatctacaaaattgttttggtttaatccatcttcttttgaaactgagggtcagtttactctgattggcatagtactgggtctggctatttacaataactgtatactggatgtacattttcccatggttgtctacaggaagctaatggggaaaaaaggaacttttcgtgacttgggagactctcacccagttctatatcagagtttaaaagatttattggagtatgaagggaatgtggaagatgacatgatgatcactttccagatatcacagacagatctttttggtaacccaatgatgtatgatctaaaggaaaatggtgataaaattccaattacaaatgaaaacaggaaggaatttgtcaatctttattctgactacattctcaataaatcagtagaaaaacagttcaaggcttttcggagaggttttcatatggtgaccaatgaatctcccttaaagtacttattcagaccagaagaaattgaattgcttatatgtggaagccggaatctagatttccaagcactagaagaaactacagaatatgacggtggctataccagggactctgttctgattaggtgaggtacttagttcttcagaggaagatttgattcaccaaaggggtgtgtgattttgcttcagacctttatctctaggtactaattcccaaataagcaaactcacaaattgtcatctatatacttagatttgtatttgtaatataatcaccatttttcagagctaatcttgtgatttatttcatgaatgaagtgttgttatatataagtctcatgtaatctcctgcatttggcgtatggattatctagtattcctcactggttagagtatgcttactgctggttagaagataattaaaataaggctaccatgtctgcaatttttcctttcttttgaactctgcatttgtgaactgttacatggcttcccaggatcaagcactttttgagtgaaatggtagtcttttatttaattcttaagataatatgtccagatacatactagtatttccattttacaccctaaaaaactaagccctgaattctcacagaaagatgtagaggttcccagttctatctgcttttaagcaaatgcccttactactctactgtctacttctgtgtactacatcatccaattctgaaagacataggcttccccatcccctgctaagactggttcaagtggcagctactgatggattgcagtgagaaggcatgcaaacacgtaccttcctggaagttgtctccaaaggctattgctctaagactcaagtatataaacactagaatgaatatcaactctatctagcaataaatgttatttttatattacagttgacccttgaacaacacagctgtgaacttcatgggccctctgacatgcagattttttttctcaactaagagcagattcagtattggtgggactcagaacctgcatatacagagggctgactttcatacatgccagtttcacagggccaactgcagaacttgagcgtgcatggattttggtatacacacgtggtcctggaaccaatccctgtcacatataccaagggatggctgtatgttactttatattcatttgttctgttattttataaggttgttcgtcgtggtatgtgggaattcaccagtatttcttctttctggtgcaccgttggtcatttctggcagcagtggtgaatgtatttactcttagcaacctctgtgctgctacctgttctgagtttcaaaggtgattcattaaagggttgggataacatggtgataggaaaaacccccctcatcagtcacaaggagtataacagcaatatctctgtaatatgattgatcatagatataatttctagtaggaaaaaaagtcatatcttgatgcatctctgagaatagttgaacatatcttgtgctattctttatagagaaattatctttgaaattaaagtcttaattttacttctagctttttataacaacataatccctacttggtatgtatcttaagatcatttttaaatgtatgatttgaagggcaaactagtgttatgtgaaaaatgacagataaagtagcttccaactcatcctcaagagttgatgatattctaaaccttttctaactaaattcagcttcttaattttctcaatataaatatgatgaaaatattaattcattaaatagtctacaagtattcggtagttgaagacttaaagtagtgcttgtaataacagaagagaaaaaagacattacaggcgtatctcactttattgcactttgcagatactgagtttttttggtggcaaccctgcatcaagcaggtctaccagcaccatttttccaacaaaatgtgctcacttcattagcatttttagcaatgattttaaattaagataatgtacttatttttagacaatgctgttacacacttgactacagtataatgtaaacgtaacttttataagcactgggaaacaaaaaaatttgtgtgactcactttactgccataatcactttatttgccatggtctgaaactgaaccggcagtatctctggggtatgcctgtatagatattttggttggtatttatttattgtatgcagaattcataaaaataaaaactgcgaggc

SEQ ID NO: 134 - DNA, 2598 bp, Homo sapiens
  source 1..2598: mol_type = genomic DNA
gtgaggcggccgccgcagcccaggcgcgggggcgacgacaggaagcgagcagctgcaaagcatctaatagaacgctactaccaccagttaactgagggctgtggaaatgaagcctgcacgaatgagttttgtgcttcctgtccaacttttcttcgtatggataataatgcagcagctattaaagccctcgagctttataagattaatgcaaaactctgtgatcctcatccctccaagaaaggagcaagctcagcttaccttgagaactcgaaaggtgcccccaacaactcctgctctgagataaaaatgaacaagaaaggcgctagaattgattttaaagatgtgacttacttaacagaagagaaggtatatgaaattcttgaattatgtagagaaagagaggattattcccctttaatccgtgttattggaagagttttttctagtgctgaggcattggtacagagcttccggaaagttaaacaacacaccaaggaagaactgaaatctcttcaagcaaaagatgaagacaaagatgaagatgaaaaggaaaaagctgcatgttctgctgctgctatggaagaagactcagaagcatcttcctcaaggataggtgatagctcacagggagacaacaatttgcaaaaattaggccctgatgatgtgtctgtggatattgatgccattagaagggtctacaccagattgctctctaatgaaaaaattgaaactgcctttctcaatgcacttgtatatttgtcacctaacgtggaatgtgacttgacgtatcacaatgtatactctcgagatcctaattatctgaatttgttcattatcgtaatggagaatagaaatctccacagtcctgaatatctggaaatggctttgccattattttgcaaagcgatgagcaagctaccccttgcagcccaaggaaaactgatcagactgtggtctaaatacaatgcagaccagattcggagaatgatggagacatttcagcaacttattacttataaagtcataagcaatgaatttaacagtcgaaatctagtgaatgatgatgatgccattgttgctgcttcgaagtgcttgaaaatggtttactatgcaaatgtagtgggaggggaagtggacacaaatcacaatgaagaagatgatgaagagcccatccctgagtccagcgagctgacacttcaggaacttttgggagaagaaagaagaaacaagaaaggtcctcgagtggaccccctggaaactgaacttggtgttaaaaccctggattgtcgaaaaccacttatcccttttgaagagtttattaatgaaccactgaatgaggttctagaaatggataaagattatacttttttcaaagtagaaacagagaacaaattctcttttatgacatgtccctttatattgaatgctgtcacaaagaatttgggattatattatgacaatagaattcgcatgtacagtgaacgaagaatcactgttctctacagcttagttcaaggacagcagttgaatccatatttgagactcaaagttagacgtgaccatatcatagatgatgcacttgtccggctagagatgatcgctatggaaaatcctgcagacttgaagaagcagttgtatgtggaatttgaaggagaacaaggagttgatgagggaggtgtttccaaagaattttttcagctggttgtggaggaaatcttcaatccagatattggtatgttcacatacgatgaatctacaaaattgttttggtttaatccatcttcttttgaaactgagggtcagtttactctgattggcatagtactgggtctggctatttacaataactgtatactggatgtacattttcccatggttgtctacaggaagctaatggggaaaaaaggaacttttcgtgacttgggagactctcacccagttctatatcagagtttaaaagatttattggagtatgaagggaatgtggaagatgacatgatgatcactttccagatatcacagacagatctttttggtaacccaatgatgtatgatctaaaggaaaatggtgataaaattccaattacaaatgaaaacaggaaggaatttgtcaatctttattctgactacattctcaataaatcagtagaaaaacagttcaaggcttttcggagaggttttcatatggtgaccaatgaatctcccttaaagtacttattcagaccagaagaaattgaattgcttatatgtggaagccggaatctagatttccaagcactagaagaaactacagaatatgacggtggctataccagggactctgttctgattagggagttctgggaaatcgttcattcatttacagatgaacagaaaagactcttcttgcagtttacaacgggcacagacagagcacctgtgggaggactaggaaaattaaagatgattatagccaaaaatggcccagacacagaaaggttacctacatctcatacttgctttaatgtgcttttacttccggaatactcaagcaaagaaaaacttaaagagagattgttgaaggccatcacgtatgccaaaggatttggcatgctgtaa

SEQ ID NO: 135 - DNA, 1112 bp, Homo sapiens
  source 1..1112: mol_type = genomic DNA
gctgggctcggggtgactacaggagacgacggggccttttcccttcgccaggacccgacacaccaggcttcgctcgctcgcgcacccctccgccgcgtagccatccgccagcgcgggcgcccgccatccgccgcctacttacgcttcacctctgccgacccggcgcgctcggctgcgggcggcggcgcctccttcggctcctcctcggaatagctcgcggcctgtagcccctggcaggagggcccctcagccccccggtgtggacaggcagcggcggctggcgacgaacgccgggatttcggcggccccggcgctccctttcccggcctcgttttccggataaggaagcgcgggtcccgcatgagccccggcggtggcggcagcgaaagagaacgaggcggtggcgggcggaggcggcgggcgagggcgactacgaccagtgaggcggccgccgcagcccaggcgcgggggcgacgacaggttaaaaatctgtaagagcctgattttagaattcaccagctcctcagaagtttggcgaaatatgagttattaagcctacgctcagatcaaggtagcagctagactggtgtgacaacctgtttttaatcagtgactcaaagctgtgatcaccctgatgtcaccgaatggccacagcttgtaaaagagagttacagtggaggtaaaaggagtggcttgcaggatggagaagctgcaccagtgttattggaatgccagcaggtttattttttgttttgcaagccagctctgcctccttacagtatgacatctgatgctggagggtcgcactttcaaaaatgagtcagctggtacatggggttatcatcaatttttagctcttctgtctgggagatacaagtttggaagcaatcttggggtacttacccacaaggctggtggagaccagatcaggagaacctcagtctgacgacattgaagctagccgaatgaagcgagcagctgcaaagcatctaatagaacgctactaccaccagttaactgagggctgtggaaatgaagcctgcacgaatgagttttgtgcttcctgtccaacttttcttcgtatggataataatgcagcagctattaaagcc

SEQ ID NO: 136 - DNA, 889 bp, Homo sapiens
  source 1..889: mol_type = genomic DNA
agaagtaggcccctggtggccgcggctgctgcagccgtaactgtcagtcctggctgagcgacggcgggagggttttgtcgcccgaggggacgcgagcgggcccggggcggggcgggacgtgcgaggcgtcgagatttgggcctcctaggagccaggctcttcgagccagccggggccccagacagggaagggcaggccctttccttcaaaggggagccctttctcggcgttttcaaggtttttggctctcttggggaagacatatttagccgtgtgcttggttaaaaatctgtaagagcctgattttagaattcaccagctcctcagaagtttggcgaaatatgagttattaagcctacgctcagatcaaggtagcagctagactggtgtgacaacctgtttttaatcagtgactcaaagctgtgatcaccctgatgtcaccgaatggccacagcttgtaaaagatcaggagaacctcagtctgacgacattgaagctagccgaatgaagcgagcagctgcaaagcatctaatagaacgctactaccaccagttaactgagggctgtggaaatgaagcctgcacgaatgagttttgtgcttcctgtccaacttttcttcgtatggataataatgcagcagctattaaagccctcgagctttataagattaatgcaaaactctgtgatcctcatccctccaagaaaggagcaagctcagcttaccttgagaactcgaaaggtgcccccaacaactcctgctctgagataaaaatgaacaagaaaggcgctagaattgattttaaagatgtgacttacttaacagaagagaaggtatatgaaattcttgaattatgtagagaaagagaggattattcccctttaatccgtg

SEQ ID NO: 137 - DNA, 779 bp, Homo sapiens
  source 1..779: mol_type = genomic DNA
tcttgcgccgcggccgcgagatccgtgtgtctcccaagatggtggcgctgggctcggggtgactacaggagacgacggggccttttcccttcgccaggacccgacacaccaggcttcgctcgctcgcgcacccctccgccgcgtagccatccgccagcgcgggcgcccgccatccgccgcctacttacgcttcacctctgccgacccggcgcgctcggctgcgggcggcggcgcctccttcggctcctcctcggaatagctcgcggcctgtagcccctggcaggagggcccctcagccccccggtgtggacaggcagcggcggctggcgacgaacgccgggatttcggcggccccggcgctccctttcccggcctcgttttccggataaggaagcgcgggtcccgcatgagccccggcggtggcggcagcgaaagagaacgaggcggtggcgggcggaggcggcgggcgagggcgactacgaccagtgaggcggccgccgcagcccaggcgcgggggcgacgacaggttaaaaatctgtaagagcctgattttagaattcaccagctcctcagaagtttggcgaaatatgatcaggagaacctcagtctgacgacattgaagctagccgaatgaagcgagcagctgcaaagcatctaatagaacgctactaccaccagttaactgagggctgtggaaatgaagcctgcacgaatgagttttgtgcttcctgtccaacttttcttcgtatggataataatgcagcagctattaaagccct

SEQ ID NO: 138 - DNA, 706 bp, Homo sapiens
  source 1..706: mol_type = genomic DNA
aggcggccgccgcagcccagctcctcagaagtttggcgaaatatgagttattaagcctacgctcagatcaaggtagcagctagactggtgtgacaacctgtttttaatcagtgactcaaagctgtgatcaccctgatgtcaccgaatggccacagcttgtaaaagatcaggagaacctcagtctgacgacattgaagctagccgaatgaagcgagcagctgcaaagcatctaatagaacgctactaccaccagttaactgagggctgtggaaatgaagcctgcacgaatgagttttgtgcttcctgtccaacttttcttcgtatggataataatgcagcagctattaaagccctcgagctttataagattaatgcaaaactctgtgatcctcatccctccaagaaaggagcaagctcagcttaccttgagaactcgaaaggtgcccccaacaactcctgctctgagataaaaatgaacaagaaaggcgctagaattgattttaaagatgtgacttacttaacagaagagaaggtatatgaaattcttgaattatgtagagaaagagaggattattcccctttaatccgtgttattggaagagttttttctagtgctgaggcattggtacagagcttccggaaagttaaacaacacaccaaggaagaactgaaatctcttcaagcaaaagatgaagacaaagatgaa

SEQ ID NO: 139 - DNA, 654 bp, Homo sapiens
  source 1..654: mol_type = genomic DNA
gcgagatccgtgtgtctcccaagatggtggcgctgggctcggggtgactacaggagacgacggggccttttcccttcgccaggacccgacacaccaggcttcgctcgctcgcgcacccctccgccgcgtagccatccgccagcgcgggcgcccgccatccgccgcctacttacgcttcacctctgccgacccggcgcgctcggctgcgggcggcggcgcctccttcggctcctcctcggaatagctcgcggcctgtagcccctggcaggagggcccctcagccccccggtgtggacaggcagcggcggctggcgacgaacgccgggatttcggcggccccggcgctccctttcccggcctcgttttccggataaggaagcgcgggtcccgcatgagccccggcggtggcggcagcgaaagagaacgaggcggtggcgggcggaggcggcgggcgagggcgactacgaccagtgaggcggccgccgcagcccaggcgcgggggcgacgacagagttattaagcctacgctcagatcaaggtagcagctagactggtgtgacaacctgtttttaatcagtgactcaaagctgtgatcaccctgatgtcaccgaatggccacagcttgtaaaagatcaggagaacctcagtctgacg

SEQ ID NO: 140 - DNA, 571 bp, Homo sapiens
  source 1..571: mol_type = genomic DNA
cattttcccatggttgtctacaggaagctaatggggaaaaaaggaacttttcgtgacttgggagactctcacccagaatttgtcaatctttattctgactacattctcaataaatcagtagaaaaacagttcaaggcttttcggagaggttttcatatggtgaccaatgaatctcccttaaagtacttattcagaccagaagaaattgaattgcttatatgtggaagccggaatctagatttccaagcactagaagaaactacagaatatgacggtggctataccagggactctgttctgattagggagttctgggaaatcgttcattcatttacagatgaacagaaaagactcttcttgcagtttacaacgggcacagacagagcacctgtgggaggactaggaaaattaaagatgattatagccaaaaatggcccagacacagaaaggttacctacatctcatacttgctttaatgtgcttttacttccggaatactcaagcaaagaaaaacttaaagagagattgttgaaggccatcacgtatgccaaaggatttggcatgctgtaaa

SEQ ID NO: 141 - DNA, 445 bp, Homo sapiens
  source 1..445: mol_type = genomic DNA
gatatcacagacagatctttttggtaacccaatgatgtatgatctaaaggaaaatggtgataaaattccaattacaaatgaaaacaggaagaatctagatttccaagcactagaagaaactacagaatatgacggtggctataccagggactctgttctgattagggagttctgggaaatcgttcattcatttacagatgaacagaaaagactcttcttgcagtttacaacgggcacagacagagcacctgtgggaggactaggaaaattaaagatgattatagccaaaaatggcccagacacagaaaggttacctacatctcatacttgctttaatgtgcttttacttccggaatactcaagcaaagaaaaacttaaagagagattgttgaaggccatcacgtatgccaaaggatttggcatgctgtaaaacaaaacaaaacaa

SEQ ID NO: 142 - DNA, 436 bp, Homo sapiens
  source 1..436: mol_type = genomic DNA
agtaggcccctggtggccgcggctgctgcagccgtaactgttaaaaatctgtaagagcctgattttagaattcaccagctcctcagaagtttggcgaaatatgagttattaagcctacgctcagatcaaggtagcagctagactggtgtgacaacctgtttttaatcagtgactcaaagctgtgatcaccctgatgtcaccgaatggccacagcttgtaaaagatcaggagaacctcagtctgacgacattgaagctagccgaatgaagcgagcagctgcaaagcatctaatagaacgctactaccaccagttaactgagggctgtggaaatgaagcctgcacgaatgagttttgtgcttcctgtccaacttttcttcgtatggataataatgcagcagctattaaagccctcgagctttataagattaatgcaaa

SEQ ID NO: 143 - DNA, 424 bp, Homo sapiens
  source 1..424: mol_type = genomic DNA
gaattattacattttctcaaatgaagagatcatttaagaaaaacaaaatgctggaaaatagtccttaaaaacttttctataataattactcttctgatgaattttacattgacacctaatttgaagctttgaatattattttttgaacaatgaattgggtttatatattaaagtgttctaaccaaaggtttgtttaatttattagagttattaagcctacgctcagatcaaggtagcagctagactggtgtgacaacctgtttttaatcagtgactcaaagctgtgatcaccctgatgtcaccgaatggccacagcttgtaaaagatcaggagaacctcagtctgacgacattgaagctagccgaatgaagcgagcagctgcaaagcatctaatagaacgctactaccaccagttaactgaggg

SEQ ID NO: 144 - DNA, 394 bp, Homo sapiens
  source 1..394: mol_type = genomic DNA
cacagtgactgcaccattttacattcccaccagcagtgaataagggttccaatttctctgcatcttttctaacacttgaggggaggtatggtgtcaagaaaacatagtcaccattattacgaaaagtaaaatatggaagagatgatccctaccatcaatcagcttacaactagaggcactgacaaatgtatacagatagctgtaatgttaaaaatctgtaagagcctgattttagaattcaccagctcctcagaagtttggcgaaatatgagttattaagcctacgctcagatcaaggtagcagctagactggtgtgacaacctgtttttaatcagtgactcaaagctgtgatcaccctgatgtcaccgaatggccacagcttgtaaaagatca

SEQ ID NO: 145 - DNA, 1536 bp, Homo sapiens
  source 1..1536: mol_type = genomic DNA
tagagatggggtcttcctatgttgcccactttggtttgttagttttagtagtttataattcctttgtattattgtgaacaaataacagttattttgaaatagaagagtgctttctatttaaaattttgctttgatagggttctgtctactttctgagccttaccttcctgtgcattcccctttggtcagtaccatcttaccacacaggctgcttttagtttcttgagttatccatcttccttctatcttatagggctcaacctaaatattactcagggaagccttccttgagagtctttctttttgcactcattggtttggggcttctttatattatactgttaattgaattctgagtcgtgtttatctcaactgagattaggtaatttattttgagaacagtaaatgtttatcatctgtcattctttttttcatgcccacattcagttatttgtaagtgctgaatgtataagtgttcatctacagataaggatcagttcttttttccccaactagaaatgttactccagttgataataacagctcaaacggaaatataaggcagaggtgagagagtcacttgaggccacgaattggagaccagcctgggcaacaaagtgagaccttatccctatgaaaaataaaattagcccagcttgggaggctgaggtggggggattgcttgaaccctggagttccaggctgcagtgagttgttatcacaccactgcactccagccgcggtgacagaccctgtcccttaaaaaaaaaaaaattataaccagccacattgaaatattttgtaagacattaatagaagactaaatgttctcatatgtttactgtttgtgttaagtacgtatggtttttagaacaacagttttctatcaagtgtggtctggttcacttagaattagatggggtagattttttgaaaagcgttttgaagttaaattagaagctaatggttttttgtcactaaatcaaattttgttttatgcgtttaagtgctacatttatttgataggcaggtgaatgtaacagattaaacttgaaaataatgtagctatgattccttcaaggaaaaacccacctacctttagttcttttagtatattgcattataagtcttttgtgtgtgcatatatagcaggcataaattggcataattctgggtttaattttaggctaggcgctatggaagtttgaactctaattacagtgtaaaaataacccagaggaaaatttcagaataataaatcattgggactatatggtacagatgtccctgttttcagattgtagaattgttgaccagtaggaatgctttatgattaaaagccaggaaattaaagtaattctgatgatttggtatttctaaagattttcatagatgacagttgagaactactctcagatgagattcttccattgctgggtaaataccttaaattggaattactgggtcacatggttaaaaatctgtaagagcctgattttagaattcaccagctcctcagaagtttggcgaaatatg

SEQ ID NO: 146 - DNA, 789 bp, Homo sapiens
  source 1..789: mol_type = genomic DNA
aagaggttgagaccatcctggcaaacatggtgaaaccccttctctactaaaaatacaaaaattagctggcgtggtggtgcacacctgtagtcctagctactcaggaggctgaggcaggagaattgtttgaacctaggaggcagaggttgcagtgagctgagatcgtgccactccagcccaccctgggtaacagagcgagactccatctcaaggaaaaaaatgaaaaattgttttcaaaaatagtatgttcacatacgatgaatctacaaaattgttttggtttaatccatcttcttttgaaactgagggtcagtttactctgattggcatagtactgggtctggctatttacaataactgtatactggatgtacattttcccatggttgtctacaggaagctaatggggaaaaaaggaacttttcgtgacttgggagactctcacccagttctatatcagagtttaaaagatttattggagtatgaagggaatgtggaagatgacatgatgatcactttccagatatcacagacagatctttttggtaacccaatgatgtatgatctaaaggaaaatggtgataaaattccaattacaaatgaaaacaggaaggaatttgtcaatctttattctgactacattctcaataaatcagtagaaaaacagttcaaggcttttcggagaggttttcatatggtgaccaatgaatctcccttaaagtacttattcagaccagaagaaattgaattgcttatatgtggaagccggaatctagatttccaagcact

SEQ ID NO: 147 - DNA, 733 bp, Homo sapiens
  source 1..733: mol_type = genomic DNA
gcggtggcgggcggaggcggcgggcgagggcgactacgaccagtgaggcggccgccgcagcccaggcgcgggggcgacgacaggttaaaaatctgtaagagcctgattttagaattcaccagctcctcagaagtttggcgaaatatgagttattaagcctacgctcagatcaaggtagcagctagactggtgtgacaacctgtttttaatcagtgactcaaagctgtgatcaccctgatgtcaccgaatggccacagcttgtaaaagatcaggagaacctcagtctgacgacattgaagctagccgaataaaggagcaagctcagcttaccttgagaactcgaaaggtgcccccaacaactcctgctctgagataaaaatgaacaagaaaggcgctagaattgattttaaagatgtgacttacttaacagaagagaaggtatatgaaattcttgaattatgtagagaaagagaggattattcccctttaatccgtgttattggaagagttttttctagtgctgaggcattggtacagagcttccggaaagttaaacaacacaccaaggaagaactgaaatctcttcaagcaaaagatgaagacaaagatgaagatgaaaaggaaaaagctgcatgttctgctgctgctatggaagaagactcagaagcatcttcctcaaggataggtgatagctcacagggagacaacaatttgcaaaaattaggccctgatg

SEQ ID NO: 148 - DNA, 474 bp, Homo sapiens
  source 1..474: mol_type = genomic DNA
agtaggcccctggtggccgcggctgctgcagccgtaactgtcagtcctggctgagcgacggcgggagggttttgtcgcccgaggggacgcgagcgggcccggggcggggcgggacgtgcgaggcgtcgagatttgggcctcctaggagccaggctcttcgagccagccggggccccagacagggaagggcaggccctttccttcaaaggggagccctttctcggcgttttcaaggtttttggctctcttggggaagacatatttagccgtgtgcttgaggggaggtatggtgtcaagaaaacatagtcaccattattacgaaaagtaaaatatggaagagatgatccctaccatcaatcagcttacaactagaggcactgacaaatgtatacagatagctgtaatgtaaggttaaaaatctgtaagagcctgattttagaattcaccagctcctcagaagtttggcgaaatatg

SEQ ID NO: 149 - DNA, 5196 bp, Homo sapiens
  source 1..5196: mol_type = genomic DNA
gcgagatccgtgtgtctcccaagatggtggcgctgggctcggggtgactacaggagacgacggggccttttcccttcgccaggacccgacacaccaggcttcgctcgctcgcgcacccctccgccgcgtagccatccgccagcgcgggcgcccgccatccgccgcctacttacgcttcacctctgccgacccggcgcgctcggctgcgggcggcggcgcctccttcggctcctcctcggaatagctcgcggcctgtagcccctggcaggagggcccctcagccccccggtgtggacaggcagcggcggctggcgacgaacgccgggatttcggcggccccggcgctccctttcccggcctcgttttccggataaggaagcgcgggtcccgcatgagccccggcggtggcggcagcgaaagagaacgaggcggtggcgggcggaggcggcgggcgagggcgactacgaccagtgaggcggccgccgcagcccaggcgcgggggcgacgacaggttaaaaatctgtaagagcctgattttagaattcaccagctcctcagaagtttggcgaaatatgagttattaagcctacgctcagatcaaggtagcagctagactggtgtgacaacctgtttttaatcagtgactcaaagctgtgatcaccctgatgtcaccgaatggccacagcttgtaaaaggtaattttgaattattttacagcctttaaaaggctgtcattgtaaagtgaaatacatactgtaaaaatgaagacaatgtatagttggcaggaatactgctaagaatagtgggcctgagagttgacctacttcatttaatctccttaaaatattttagtgtctttttttctcattaaaaatatcagtagccactatcaaagacctatctgtatgtataaacaggaaagtatttctcaaaaaaacttcaaggttttaaacattttactataaacattatagaaaacattaaaaatttcttaatatgcattttaaagtatgccttttatgtggtgaacgttttaactaaacatttctctagaagtttttataacattaataaaactagtatacttttctctcctagagagttacagtggaggtaaaaggagtggcttgcaggatggagaagctgcaccagtgttattggaagtgagccaccatttgaatttgctagctcatgctgcagtattcagattagtgggtgttttgtgatcatattttctgcgattcaaatcaagacctaaaattgattctcattctgagatttacattttattatccaatgttatttggttattgtttcagttttaaaatttctgacttgttattctgacacactttaggataacctaagtcaatagtttaatacaaaaatttccctttggttatatgttttgaattaggttatatgttctgcatttacaagcacatacaggattcttacttccagcaacttggcagtaaaagaataagtagactctttaggagccaaagtcaagcttgggaactgttgctaggtggtatatatttcatagtttatgtttgtttccaagacaaggtctcactccatcgcccaggctggagtgcagtggcacgatcacagttcactgcaactttgaccttctgggctcaagtgaccctcccacctcagcctcccaagttgctgggactaaaggcacccaccaccacacccggctaagagacgaggtttcatcatgttgcccaggttgaccttgaactcctgagctcaagtggtccttatgtcttgacctcccaaagtgctgagattacagacatgaactaccacacctggcatatgtcatagttttgagagtttgaattctaacctcgggactttggtaacttatttataatattctagaaatatactgttattaggatgagtagaaattcattcagacagaaactattataaattactgcaagaaaaatgtctgctagttctgcatatattcatttttctcttgattaaaaaacaatttccaatttgagtagaacaactttgctatgtttaatagacccaggacagatttattttaaggtaataatctttcaatccttcttcttctatactggattggtttaaattacttagcttgtcttatcaatggtttttaatagcctactttaatatatgtaaaaagtagtaattaatatgttacagtttggtggcaaacattttgatgccaaagttcacatattctcttgcttagggaacagaaattgggaagatagatgtagttatcatttgataatgtatttaaactctatcccatttcaggatctcaaaactttgtaacagttacatattgtacttctaagacttagatttgtttttcttcttgtgtcttacctttttgcagtaatatttttattttcctatcatcatgtcctcattttttccctctcttctctttccctgttaattttgaaagttttgctgcctacgtgtttgaaaacttctaatctgcctctcttccctcagtgccagcaggtttattttttgttttgcaagccagctctgcctccttacagtatgacatctgatgctggagggtcgcactttcaaaaatgagtcagctggtacatggggttatcatcaatttttagctcttctgtctgggagatacaagtttggaagcaatcttggggtacttacccacaaggctggtggagaccagatcaggagaacctcagtctgacgacattgaagctagccgaatgaagcgagcagctgcaaagcatctaatagaacgctactaccaccagttaactgagggctgtggaaatgaagcctgcacgaatgagttttgtgcttcctgtccaacttttcttcgtatggataataatgcagcagctattaaagccctcgagctttataagattaatgcaaaactctgtgatcctcatccctccaagaaaggagcaagctcagcttaccttgagaactcgaaaggtgcccccaacaactcctgctctgagataaaaatgaacaagaaaggcgctagaattgattttaaagatgtgacttacttaacagaagagaaggtatatgaaattcttgaattatgtagagaaagagaggattattcccctttaatccgtgttattggaagagttttttctagtgctgaggcattggtacagagcttccggaaagttaaacaacacaccaaggaagaactgaaatctcttcaagcaaaagatgaagacaaagatgaagatgaaaaggaaaaagctgcatgttctgctgctgctatggaagaagactcagaagcatcttcctcaaggataggtgatagctcacagggagacaacaatttgcaaaaattaggccctgatgatgtgtctgtggatattgatgccattagaagggtctacaccagattgctctctaatgaaaaaattgaaactgcctttctcaatgcacttgtatatttgtcacctaacgtggaatgtgacttgacgtatcacaatgtatactctcgagatcctaattatctgaatttgttcattatcgtaatggagaatagaaatctccacagtcctgaatatctggaaatggctttgccattattttgcaaagcgatgagcaagctaccccttgcagcccaaggaaaactgatcagactgtggtctaaatacaatgcagaccagattcggagaatgatggagacatttcagcaacttattacttataaagtcataagcaatgaatttaacagtcgaaatctagtgaatgatgatgatgccattgttgctgcttcgaagtgcttgaaaatggtttactatgcaaatgtagtgggaggggaagtggacacaaatcacaatgaagaagatgatgaagagcccatccctgagtccagcgagctgacacttcaggaacttttgggagaagaaagaagaaacaagaaaggtcctcgagtggaccccctggaaactgaacttggtgttaaaaccctggattgtcgaaaaccacttatcccttttgaagagtttattaatgaaccactgaatgaggttctagaaatggataaagattatacttttttcaaagtagaaacagagaacaaattctcttttatgacatgtccctttatattgaatgctgtcacaaagaatttgggattatattatgacaatagaattcgcatgtacagtgaacgaagaatcactgttctctacagcttagttcaaggacagcagttgaatccatatttgagactcaaagttagacgtgaccatatcatagatgatgcacttgtccggctagagatgatcgctatggaaaatcctgcagacttgaagaagcagttgtatgtggaatttgaaggagaacaaggagttgatgagggaggtgtttccaaagaattttttcagctggttgtggaggaaatcttcaatccagatattggtatgttcacatacgatgaatctacaaaattgttttggtttaatccatcttcttttgaaactgagggtcagtttactctgattggcatagtactgggtctggctatttacaataactgtatactggatgtacattttcccatggttgtctacaggaagctaatggggaaaaaaggaacttttcgtgacttgggagactctcacccagttctatatcagagtttaaaagatttattggagtatgaagggaatgtggaagatgacatgatgatcactttccagatatcacagacagatctttttggtaacccaatgatgtatgatctaaaggaaaatggtgataaaattccaattacaaatgaaaacaggaaggaatttgtcaatctttattctgactacattctcaataaatcagtagaaaaacagttcaaggcttttcggagaggttttcatatggtgaccaatgaatctcccttaaagtacttattcagaccagaagaaattgaattgcttatatgtggaagccggaatctagatttccaagcactagaagaaactacagaatatgacggtggctataccagggactctgttctgattagggagttctgggaaatcgttcattcatttacagatgaacagaaaagactcttcttgcagtttacaacgggcacagacagagcacctgtgggaggactaggaaaattaaagatgattatagccaaaaatggcccagacacagaaaggt

SEQ ID NO: 150 - DNA, 3371 bp, Homo sapiens
  source 1..3371: mol_type = genomic DNA
gcgagatccgtgtgtctcccaagatggtggcgctgggctcggggtgactacaggagacgacggggccttttcccttcgccaggacccgacacaccaggcttcgctcgctcgcgcacccctccgccgcgtagccatccgccagcgcgggcgcccgccatccgccgcctacttacgcttcacctctgccgacccggcgcgctcggctgcgggcggcggcgcctccttcggctcctcctcggaatagctcgcggcctgtagcccctggcaggagggcccctcagccccccggtgtggacaggcagcggcggctggcgacgaacgccgggatttcggcggccccggcgctccctttcccggcctcgttttccggataaggaagcgcgggtcccgcatgagccccggcggtggcggcagcgaaagagaacgaggcggtggcgggcggaggcggcgggcgagggcgactacgaccagtgaggcggccgccgcagcccaggcgcgggggcgacgacaggttaaaaatctgtaagagcctgattttagaattcaccagctcctcagaagtttggcgaaatatgagttattaagcctacgctcagatcaaggtagcagctagactggtgtgacaacctgtttttaatcagtgactcaaagctgtgatcaccctgatgtcaccgaatggccacagcttgtaaaagatcaggagaacctcagtctgacgacattgaagctagccgaatgaagcgagcagctgcaaagcatctaatagaacgctactaccaccagttaactgagggctgtggaaatgaagcctgcacgaatgagttttgtgcttcctgtccaacttttcttcgtatggataataatgcagcagctattaaagccctcgagctttataagattaatgcaaaactctgtgatcctcatccctccaagaaaggagcaagctcagcttaccttgagaactcgaaaggtgcccccaacaactcctgctctgagataaaaatgaacaagaaaggcgctagaattgattttaaagatgtgacttacttaacagaagagaaggtatatgaaattcttgaattatgtagagaaagagaggattattcccctttaatccgtgttattggaagagttttttctagtgctgaggcattggtacagagcttccggaaagttaaacaacacaccaaggaagaactgaaatctcttcaagcaaaagatgaagacaaagatgaagatgaaaaggaaaaagctgcatgttctgctgctgctatggaagaagactcagaagcatcttcctcaaggataggtgatagctcacagggagacaacaatttgcaaaaattaggccctgatgatgtgtctgtggatattgatgccattagaagggtctacaccagattgctctctaatgaaaaaattgaaactgcctttctcaatgcacttgtatatttgtcacctaacgtggaatgtgacttgacgtatcacaatgtatactctcgagatcctaattatctgaatttgttcattatcgtaatggagaatagaaatctccacagtcctgaatatctggaaatggctttgccattattttgcaaagcgatgagcaagctaccccttgcagcccaaggaaaactgatcagactgtggtctaaatacaatgcagaccagattcggagaatgatggagacatttcagcaacttattacttataaagtcataagcaatgaatttaacagtcgaaatctagtgaatgatgatgatgccattgttgctgcttcgaagtgcttgaaaatggtttactatgcaaatgtagtgggaggggaagtggacacaaatcacaatgaagaagatgatgaagagcccatccctgagtccagcgagctgacacttcaggaacttttgggagaagaaagaagaaacaagaaaggtcctcgagtggaccccctggaaactgaacttggtgttaaaaccctggattgtcgaaaaccacttatcccttttgaagagtttattaatgaaccactgaatgaggttctagaaatggataaagattatacttttttcaaagtagaaacagagaacaaattctcttttatgacatgtccctttatattgaatgctgtcacaaagaatttgggattatattatgacaatagaattcgcatgtacagtgaacgaagaatcactgttctctacagcttagttcaaggacagcagttgaatccatatttgagactcaaagttagacgtgaccatatcatagatgatgcacttgtccgggtaagttgggctgctagattaaaaacctaataatggggatatcatgatacagttcagtgaattcattttaaaagtgactgaaaaaaatgataccatatagcataggaacacatggacatttctgatcttatataagtattatacttttgttgttcctgtgcaagtttatagatgtgttctacaaagtatcggttgtattatataatggtcatgctatctttgaaaaagaatgggttttctaaatcttgaaaactaaatccaaagtttctttcattcagaagagaatagagtgttggacaaagaccagaacaagagaaatgtggagatacccaataataagtgtggatgtgcagtcttgaactgggagtaatggtacagtaaaaccataccataaaattataggtagtgtccaaaaaattccatcgtgtaaaattcagagttgcattattgtggacttgatgaagtgaccatggcagatcagtgcctgttgccagtaagagttgagtcctgctgggccacttagaatatccctgtgtggacggcactgcctggctgtggtagtttcttcccacttaaaaattcatagagacaactctgggtcttggaacttctggaaaacagcagctattccaaaaatctggggattagtggtgcctgtaacatcaagtccagggagattgagcagggaaatactggaaactcaggtactcatcctaacttcctggttttccagatggggttgccatttgttccttttctttcctccacaagataattttagtgtatctgtttaagaatataagagtggccagaagacagaaagcagtcgtcagtcacatttcaccaaaatttacatttgtctcaggtgcattatcgcagagctttattgtatttctagtattagctatccctgtcattgctgctacttttttatcatcttcaagtaaaatttaatgtcaacaaaaattaaggtagttaataatactatagtatactagtaaagttgtctgacacagacaactaggaaatgtgatttttactttaaaatgtattttagttttagaatgtctaaattttagttttagaat

SEQ ID NO: 151 - DNA, 2672 bp, Homo sapiens
  source 1..2672: mol_type = genomic DNA
atccgtgtgtctcccaagatggtggcgctgggctcggggtgactacaggagacgacggggccttttcccttcgccaggacccgacacaccaggcttcgctcgctcgcgcacccctccgccgcgtagccatccgccagcgcgggcgcccgccatccgccgcctacttacgcttcacctctgccgacccggcgcgctcggctgcgggcggcggcgcctccttcggctcctcctcggaatagctcgcggcctgtagcccctggcaggagggcccctcagccccccggtgtggacaggcagcggcggctggcgacgaacgccgggatttcggcggccccggcgctccctttcccggcctcgttttccggataaggaagcgcgggtcccgcatgagccccggcggtggcggcagcgaaagagaacgaggcggtggcgggcggaggcggcgggcgagggcgactacgaccagtgaggcggccgccgcagcccaggcgcgggggcgacgacaggttaaaaatctgtaagagcctgattttagaattcaccagctcctcagaagtttggcgaaatatgagttattaagcctacgctcagatcaaggtagcagctagactggtgtgacaacctgtttttaatcagtgactcaaagctgtgatcaccctgatgtcaccgaatggccacagcttgtaaaagagagttacagtggaggtaaaaggagtggcttgcaggatggagaagctgcaccagtgttattggaaatcaggagaacctcagtctgacgacattgaagctagccgaatgaagcgagcagctgcaaagcatctaatagaacgctactaccaccagttaactgagggctgtggaaatgaagcctgcacgaatgagttttgtgcttcctgtccaacttttcttcgtatggataataatgcagcagctattaaagccctcgagctttataagattaatgcaaaactctgtgatcctcatccctccaagaaaggagcaagctcagcttaccttgagaactcgaaaggtgcccccaacaactcctgctctgagataaaaatgaacaagaaaggcgctagaattgattttaaaggtaagatgttttattttcaattgagaattgttgcctgaaaaccatgtgggagatttaaatgtattagtttttatttgttttttcttctgtgacataaagacattttgatatcgtagaaccaattttttattgtggtaacggacaggaataataactacattttacaggtctaatcattgctaattagaagcagatcatatgccaaaagttcatttgttaatagattgatttgaactttttaaaattcttaggaaaaatgtattaagtggtagtgaatctccaaaactaggccacaacatctatttaagttatagaataactggactaagtatctggcatgagttctggaacctcaggatgatgtgatgaaagaagcagaaagaggaaacagtgggttttttccatttttgaaggcaagacaaaattttgtgatagttatgtgagaattctacgtttccttcagatatatgcttctcactctccttccggacatttggtacagtcatgctgccaaggatcatgacctaccaatgacagtcttcactcaggtcttttgttttctaaatggtcctacgtccaaaattcagaattcgattaccttgtcgctaatactaaaactccaagttattttcttcagtgaaggtaattagtaacaaagtaatcaaatttttgaatgactaccagggcttagcgcccctccactctcacccctacacacacccagaggcaattgtattttaagagagaaagctttttttttatgacatacaagtcagagaattttagaggcatttgcctctaaaactttcactaacatcatttgaatcaagtttgaaagaattagtgaagtggcattgtgttataacctctactctgtttccacaataaaattattttcgtcactttacacaactttgttgcttcagagtgtataattctgtttcatgaattagttcacacactatgggaaaataggtaaatgttgtctgtatatatagtgtgtcagtataatgtggaagctgcattgactttattgtacacagttctccagtaagtgtgcaccagagagtaccagtaactgaatgtagagtgctggcacagtggaatgcagccagctgcgggggatgtggtacatgaggaatgtgctcatctgctcttttggccacgtgctccatcttagaggtgcttattgtgtggctttatccagtctttatgccccctcctctttttgctcaagtctgcattatagcagttgtgacctttccttatccctgttttctaatatgctactgttactgttccctgttcgttactggtttttttgtttttgtttttgcattgttctatagttactattgtatattggaaattagagatgctttctgtacactagtactcttattttgattattaattatgtttgttaacactaattacaaagttgcataagtattaagtagtctgcaccaaactgtttttgcgtaggaggtttttaagtgcaaaatttaaaagattgagtattttcagggacacatttatcacaagaaatcttataaaaatgtctttctcagtagaa

SEQ ID NO: 152 - DNA, 1873 bp, Homo sapiens
  source 1..1873: mol_type = genomic DNA
aataaaactagtatacttttctctcctagagagttacagtggaggtaaaaggagtggcttgcaggatggagaagctgcaccagtgttattggaagtgagccaccatttgaatttgctagctcatgctgcagtattcagattagtgggtgttttgtgatcatattttctgcgattcaaatcaagacctaaaattgattctcattctgagatttacattttattatccaatgttatttggttattgtttcagttttaaaatttctgacttgttattctgacacactttaggataacctaagtcaatagtttaatacaaaaatttccctttggttatatgttttgaattaggttatatgttctgcatttacaagcacatacaggattcttacttccagcaacttggcagtaaaagaataagtagactctttaggagccaaagtcaagcttgggaactgttgctaggtggtatatatttcatagtttatgtttgtttccaagacaaggtctcactccatcgcccaggctggagtgcagtggcacgatcacagttcactgcaactttgaccttctgggctcaagtgaccctcccacctcagcctcccaagttgctgggactaaaggcacccaccaccacacccggctaagagacgaggtttcatcatgttgcccaggttgaccttgaactcctgagctcaagtggtccttatgtcttgacctcccaaagtgctgagattacagacatgaactaccacacctggcatatgtcatagttttgagagtttgaattctaacctcgggactttggtaacttatttataatattctagaaatatactgttattaggatgagtagaaattcattcagacagaaactattataaattactgcaagaaaaatgtctgctagttctgcatatattcatttttctcttgattaaaaaacaatttccaatttgagtagaacaactttgctatgtttaatagacccaggacagatttattttaaggtaataatctttcaatccttcttcttctatactggattggtttaaattacttagcttgtcttatcaatggtttttaatagcctactttaatatatgtaaaaagtagtaattaatatgttacagtttggtggcaaacattttgatgccaaagttcacatattctcttgcttagggaacagaaattgggaagatagatgtagttatcatttgataatgtatttaaactctatcccatttcaggatctcaaaactttgtaacagttacatattgtacttctaagacttagatttgtttttcttcttgtgtcttacctttttgcagtaatatttttattttcctatcatcatgtcctcattttttccctctcttctctttccctgttaattttgaaagttttgctgcctacgtgtttgaaaacttctaatctgcctctcttccctcagtgccagcaggtttattttttgttttgcaagccagctctgcctccttacagtatgacatctgatgctggagggtcgcactttcaaaaatgagtcagctggtacatggggttatcatcaatttttagctcttctgtctgggagatacaagtttggaagcaatcttggggtacttacccacaaggctggtggagaccagatcaggagaacctcagtctgacgacattgaagctagccgaatgaagcgagcagctgcaaagcatctaatagaacgctactaccaccagttaactgagggctgtggaaatgaagcctgcacgaatgagttttgtgcttcctgtccaacttttcttcgtatggataataatgcagcagctattaaagccctcgagctttataagattaatgcaaaactctgtgatcct

SEQ ID NO: 153 - DNA, 772 bp, Homo sapiens
  source 1..772: mol_type = genomic DNA
cttaaatcttgtttacaaaattgtcttcctaagtaatatgtctacctttttttttggaatatggaatattttgctaactgtttctcaattgcattttacagatcaggagaacctcagtctgacgacattgaagctagccgaatgaagcgagcagctgcaaagcatctaatagaacgctactaccaccagttaactgagggctgtggaaatgaagcctgcacgaatgagttttgtgcttcctgtccaacttttcttcgtatggataataatgcagcagctattaaagccctcgagctttataagattaatgcaaaactctgtgatcctcatccctccaagaaaggagcaagctcagcttaccttgagaactcgaaaggtgcccccaacaactcctgctctgagataaaaatgaacaagaaaggcgctagaattgattttaaagatgtgacttacttaacagaagagaaggtatatgaaattcttgaattatgtagagaaagagaggattattcccctttaatccgtgttattggaagagttttttctagtgctgaggcattggtacagagcttccggaaagttaaacaacacaccaaggaagaactgaaatctcttcaagcaaaagatgaagacaaagatgaagatgaaaaggaaaaagctgcatgttctgctgctgctatggaagaagactcagaagcatcttcctcaaggataggtgatagctcacagggagacaacaatttgcaaaaattaggccctgatgatgtgtctg

SEQ ID NO: 154 - DNA, 20 bp, synthetic construct
  source 1..20: mol_type = other DNA
  modified_base 1: mod_base = OTHER; note = 2'-O-methoxyethyl modified methylated cytosine with phosphorothioate linkage
  modified_base 2: mod_base = OTHER; note = 2'-O-methoxyethyl modified nucleotide with phosphorothioate linkage
  modified_base 3: mod_base = OTHER; note = 2'-O-methoxyethyl modified methylated cytosine with phosphorothioate linkage
  modified_base 4: mod_base = OTHER; note = 2'-O-methoxyethyl modified thymine with phosphorothioate linkage
  modified_base 5: mod_base = OTHER; note = 2'-O-methoxyethyl modified thymine with phosphorothioate linkage
  modified_base 6: mod_base = OTHER; note = Nucleotide with phosphorothioate linkage
  modified_base 7: mod_base = OTHER; note = Nucleotide with phosphorothioate linkage
  modified_base 8: mod_base = OTHER; note = Nucleotide with phosphorothioate linkage
  modified_base 9: mod_base = OTHER; note = Nucleotide with phosphorothioate linkage
  modified_base 10: mod_base = OTHER; note = Nucleotide with phosphorothioate linkage
  modified_base 11: mod_base = OTHER; note = Nucleotide with phosphorothioate linkage
  modified_base 12: mod_base = OTHER; note = Nucleotide with phosphorothioate linkage
  modified_base 13: mod_base = OTHER; note = Nucleotide with phosphorothioate linkage
  modified_base 14: mod_base = OTHER; note = Nucleotide with phosphorothioate linkage
  modified_base 15: mod_base = OTHER; note = Nucleotide with phosphorothioate linkage
  modified_base 16: mod_base = OTHER; note = 2'-O-methoxyethyl modified nucleotide with phosphorothioate linkage
  modified_base 17: mod_base = OTHER; note = 2'-O-methoxyethyl modified methylated cytosine with phosphorothioate linkage
  modified_base 18: mod_base = OTHER; note = 2'-O-methoxyethyl modified thymine with phosphorothioate linkage
  modified_base 19: mod_base = OTHER; note = 2'-O-methoxyethyl modified thymine with phosphorothioate linkage
  modified_base 20: mod_base = OTHER; note = 2'-O-methoxyethyl modified methylated cytosine
  misc_feature 1..5: note = RNA
  misc_feature 6..15: note = DNA
  misc_feature 16..20: note = RNA
cgcttcattcggctagcttc

SEQ ID NO: 155 - DNA, 20 bp, synthetic construct
  source 1..20: mol_type = other DNA
  modified_base 1: mod_base = OTHER; note = 2'-O-methoxyethyl modified nucleotide with phosphorothioate linkage
  modified_base 2: mod_base = OTHER; note = 2'-O-methoxyethyl modified thymine with phosphorothioate linkage
  modified_base 3: mod_base = OTHER; note = 2'-O-methoxyethyl modified thymine with phosphorothioate linkage
  modified_base 4: mod_base = OTHER; note = 2'-O-methoxyethyl modified methylated cytosine with phosphorothioate linkage
  modified_base 5: mod_base = OTHER; note = 2'-O-methoxyethyl modified nucleotide with phosphorothioate linkage
  modified_base 6: mod_base = OTHER; note = Nucleotide with phosphorothioate linkage
  modified_base 7: mod_base = OTHER; note = Nucleotide with phosphorothioate linkage
  modified_base 8: mod_base = OTHER; note = Nucleotide with phosphorothioate linkage
  modified_base 9: mod_base = OTHER; note = Nucleotide with phosphorothioate linkage
  modified_base 10: mod_base = OTHER; note = Nucleotide with phosphorothioate linkage
  modified_base 11: mod_base = OTHER; note = Nucleotide with phosphorothioate linkage
  modified_base 12: mod_base = OTHER; note = Nucleotide with phosphorothioate linkage
  modified_base 13: mod_base = OTHER; note = Nucleotide with phosphorothioate linkage
  modified_base 14: mod_base = OTHER; note = Nucleotide with phosphorothioate linkage
  modified_base 15: mod_base = OTHER; note = Nucleotide with phosphorothioate linkage
  modified_base 16: mod_base = OTHER; note = 2'-O-methoxyethyl modified nucleotide with phosphorothioate linkage
  modified_base 17: mod_base = OTHER; note = 2'-O-methoxyethyl modified thymine with phosphorothioate linkage
  modified_base 18: mod_base = OTHER; note = 2'-O-methoxyethyl modified nucleotide with phosphorothioate linkage
  modified_base 19: mod_base = OTHER; note = 2'-O-methoxyethyl modified thymine with phosphorothioate linkage
  modified_base 20: mod_base = OTHER; note = 2'-O-methoxyethyl modified methylated cytosine
  misc_feature 1..5: note = RNA
  misc_feature 6..15: note = DNA
  misc_feature 16..20: note = RNA
attcggctagcttcaatgtc

SEQ ID NO: 156 - DNA, 20 bp, synthetic construct
  source 1..20: mol_type = other DNA
  modified_base 1: mod_base = OTHER; note = 2'-O-methoxyethyl modified thymine with phosphorothioate linkage
  modified_base 2: mod_base = OTHER; note = 2'-O-methoxyethyl modified methylated cytosine with phosphorothioate linkage
  modified_base 3: mod_base = OTHER; note = 2'-O-methoxyethyl modified nucleotide with phosphorothioate linkage
  modified_base 4: mod_base = OTHER; note = 2'-O-methoxyethyl modified methylated cytosine with phosphorothioate linkage
  modified_base 5: mod_base = OTHER; note = 2'-O-methoxyethyl modified thymine with phosphorothioate linkage
  modified_base 6: mod_base = OTHER; note = Nucleotide with phosphorothioate linkage
  modified_base 7: mod_base = OTHER; note = Nucleotide with phosphorothioate linkage
  modified_base 8: mod_base = OTHER; note = Nucleotide with phosphorothioate linkage
  modified_base 9: mod_base = OTHER; note = Nucleotide with phosphorothioate linkage
  modified_base 10: mod_base = OTHER; note = Nucleotide with phosphorothioate linkage
  modified_base 11: mod_base = OTHER; note = Nucleotide with phosphorothioate linkage
  modified_base 12: mod_base = OTHER; note = Nucleotide with phosphorothioate linkage
  modified_base 13: mod_base = OTHER; note = Nucleotide with phosphorothioate linkage
  modified_base 14: mod_base = OTHER; note = Nucleotide with phosphorothioate linkage
  modified_base 15: mod_base = OTHER; note = Nucleotide with phosphorothioate linkage
  modified_base 16: mod_base = OTHER; note = 2'-O-methoxyethyl modified nucleotide with phosphorothioate linkage
  modified_base 17: mod_base = OTHER; note = 2'-O-methoxyethyl modified nucleotide with phosphorothioate linkage
  modified_base 18: mod_base = OTHER; note = 2'-O-methoxyethyl modified methylated cytosine with phosphorothioate linkage
  modified_base 19: mod_base = OTHER; note = 2'-O-methoxyethyl modified thymine with phosphorothioate linkage
  modified_base 20: mod_base = OTHER; note = 2'-O-methoxyethyl modified thymine
  misc_feature 1..5: note = RNA
  misc_feature 6..15: note = DNA
  misc_feature 16..20: note = RNA
tcgcttcattcggctagctt

SEQ ID NO: 157 - DNA, 20 bp, synthetic construct
  source 1..20: mol_type = other DNA
  modified_base 1: mod_base = OTHER; note = 2'-O-methoxyethyl modified nucleotide with phosphorothioate linkage
  modified_base 2: mod_base = OTHER; note = 2'-O-methoxyethyl modified methylated cytosine with phosphorothioate linkage
  modified_base 3: mod_base = OTHER; note = 2'-O-methoxyethyl modified thymine with phosphorothioate linkage
  modified_base 4: mod_base = OTHER; note = 2'-O-methoxyethyl modified thymine with phosphorothioate linkage
  modified_base 5: mod_base = OTHER; note = 2'-O-methoxyethyl modified methylated cytosine with phosphorothioate linkage
  modified_base 6: mod_base = OTHER; note = Nucleotide with phosphorothioate linkage
  modified_base 7: mod_base = OTHER; note = Nucleotide with phosphorothioate linkage
  modified_base 8: mod_base = OTHER; note = Nucleotide with phosphorothioate linkage
  modified_base 9: mod_base = OTHER; note = Nucleotide with phosphorothioate linkage
  modified_base 10: mod_base = OTHER; note = Nucleotide with phosphorothioate linkage
  modified_base 11: mod_base = OTHER; note = Nucleotide with phosphorothioate linkage
  modified_base 12: mod_base = OTHER; note = Nucleotide with phosphorothioate linkage
  modified_base 13: mod_base = OTHER; note = Nucleotide with phosphorothioate linkage
  modified_base 14: mod_base = OTHER; note = Nucleotide with phosphorothioate linkage
  modified_base 15: mod_base = OTHER; note = Nucleotide with phosphorothioate linkage
  modified_base 16: mod_base = OTHER; note = 2'-O-methoxyethyl modified methylated cytosine with phosphorothioate linkage
  modified_base 17: mod_base = OTHER; note = 2'-O-methoxyethyl modified thymine with phosphorothioate linkage
  modified_base 18: mod_base = OTHER; note = 2'-O-methoxyethyl modified thymine with phosphorothioate linkage
  modified_base 19: mod_base = OTHER; note = 2'-O-methoxyethyl modified methylated cytosine with phosphorothioate linkage
  modified_base 20: mod_base = OTHER; note = 2'-O-methoxyethyl modified nucleotide
  misc_feature 1..5: note = RNA
  misc_feature 6..15: note = DNA
  misc_feature 16..20: note = RNA
gcttcattcggctagcttca

SEQ ID NO: 158 - DNA, 17 bp, synthetic construct
  source 1..17: mol_type = other DNA
  modified_base 1: mod_base = OTHER; note = 2'-O-methoxyethyl modified thymine with phosphorothioate linkage
  modified_base 2: mod_base = OTHER; note = 2'-O-methoxyethyl modified methylated cytosine with phosphorothioate linkage
  modified_base 3: mod_base = OTHER; note = 2'-O-methoxyethyl modified nucleotide with phosphorothioate linkage
  modified_base 4: mod_base = OTHER; note = Nucleotide with phosphorothioate linkage
  modified_base 5: mod_base = OTHER; note = Nucleotide with phosphorothioate linkage
  modified_base 6: mod_base = OTHER; note = Nucleotide with phosphorothioate linkage
  modified_base 7: mod_base = OTHER; note = Nucleotide with phosphorothioate linkage
  modified_base 8: mod_base = OTHER; note = Nucleotide with phosphorothioate linkage
  modified_base 9: mod_base = OTHER; note = Nucleotide with phosphorothioate linkage
  modified_base 10: mod_base = OTHER; note = Nucleotide with phosphorothioate linkage
  modified_base 11: mod_base = OTHER; note = Nucleotide with phosphorothioate linkage
  modified_base 12: mod_base = OTHER; note = Nucleotide with phosphorothioate linkage
  modified_base 13: mod_base = OTHER; note = Nucleotide with phosphorothioate linkage
  modified_base 14: mod_base = OTHER; note = 2'-O-methoxyethyl modified nucleotide with phosphorothioate linkage
  modified_base 15: mod_base = OTHER; note = 2'-O-methoxyethyl modified thymine with phosphorothioate linkage
  modified_base 16: mod_base = OTHER; note = 2'-O-methoxyethyl modified nucleotide with phosphorothioate linkage
  modified_base 17: mod_base = OTHER; note = 2'-O-methoxyethyl modified thymine
  misc_feature 1..3: note = RNA
  misc_feature 4..13: note = DNA
  misc_feature 14..17: note = RNA
tcggctagcttcaatgt

SEQ ID NO: 159 - DNA, 20 bp, synthetic construct
  source 1..20: mol_type = other DNA
  modified_base 1: mod_base = OTHER; note = 2'-O-methoxyethyl modified methylated cytosine with phosphorothioate linkage
  modified_base 2: mod_base = OTHER; note = 2'-O-methoxyethyl modified nucleotide with phosphorothioate linkage
  modified_base 3: mod_base = OTHER; note = 2'-O-methoxyethyl modified thymine with phosphorothioate linkage
  modified_base 4: mod_base = OTHER; note = 2'-O-methoxyethyl modified thymine with phosphorothioate linkage
  modified_base 5: mod_base = OTHER; note = 2'-O-methoxyethyl modified methylated cytosine with phosphorothioate linkage
  modified_base 6: mod_base = OTHER; note = Nucleotide with phosphorothioate linkage
  modified_base 7: mod_base = OTHER; note = Nucleotide with phosphorothioate linkage
  modified_base 8: mod_base = OTHER; note = Nucleotide with phosphorothioate linkage
  modified_base 9: mod_base = OTHER; note = Nucleotide with phosphorothioate linkage
  modified_base 10: mod_base = OTHER; note = Nucleotide with phosphorothioate linkage
  modified_base 11: mod_base = OTHER; note = Nucleotide with phosphorothioate linkage
  modified_base 12: mod_base = OTHER; note = Nucleotide with phosphorothioate linkage
  modified_base 13: mod_base = OTHER; note = Nucleotide with phosphorothioate linkage
  modified_base 14: mod_base = OTHER; note = Nucleotide with phosphorothioate linkage
  modified_base 15: mod_base = OTHER; note = Nucleotide with phosphorothioate linkage
  modified_base 16: mod_base = OTHER; note = 2'-O-methoxyethyl modified nucleotide with phosphorothioate linkage
  modified_base 17: mod_base = OTHER; note = 2'-O-methoxyethyl modified nucleotide with phosphorothioate linkage
  modified_base 18: mod_base = OTHER; note = 2'-O-methoxyethyl modified thymine with phosphorothioate linkage
  modified_base 19: mod_base = OTHER; note = 2'-O-methoxyethyl modified nucleotide with phosphorothioate linkage
  modified_base 20: mod_base = OTHER; note = 2'-O-methoxyethyl modified thymine
  misc_feature 1..5: note = RNA
  misc_feature 6..15: note = DNA
  misc_feature 16..20: note = RNA
cattcggctagcttcaatgt

SEQ ID NO: 160 - DNA, 18 bp, synthetic construct
  source 1..18: mol_type = other DNA
  modified_base 1: mod_base = OTHER; note = 2'-O-methoxyethyl modified thymine with phosphorothioate linkage
  modified_base 2: mod_base = OTHER; note = 2'-O-methoxyethyl modified methylated cytosine with phosphorothioate linkage
  modified_base 3: mod_base = OTHER; note = 2'-O-methoxyethyl modified nucleotide with phosphorothioate linkage
  modified_base 4: mod_base = OTHER; note = 2'-O-methoxyethyl modified nucleotide with phosphorothioate linkage
  modified_base 5: mod_base = OTHER; note = Nucleotide with phosphorothioate linkage
  modified_base 6: mod_base = OTHER; note = Nucleotide with phosphorothioate linkage
  modified_base 7: mod_base = OTHER; note = Nucleotide with phosphorothioate linkage
  modified_base 8: mod_base = OTHER; note = Nucleotide with phosphorothioate linkage
  modified_base 9: mod_base = OTHER; note = Nucleotide with phosphorothioate linkage
  modified_base 10: mod_base = OTHER; note = Nucleotide with phosphorothioate linkage
  modified_base 11: mod_base = OTHER; note = Nucleotide with phosphorothioate linkage
  modified_base 12: mod_base = OTHER; note = Nucleotide with phosphorothioate linkage
  modified_base 13: mod_base = OTHER; note = Nucleotide with phosphorothioate linkage
  modified_base 14: mod_base = OTHER; note = Nucleotide with phosphorothioate linkage
  modified_base 15: mod_base = OTHER; note = 2'-O-methoxyethyl modified thymine with phosphorothioate linkage
  modified_base 16: mod_base = OTHER; note = 2'-O-methoxyethyl modified nucleotide with phosphorothioate linkage
  modified_base 17: mod_base = OTHER; note = 2'-O-methoxyethyl modified thymine with phosphorothioate linkage
  modified_base 18: mod_base = OTHER; note = 2'-O-methoxyethyl modified methylated cytosine
  misc_feature 1..4: note = RNA
  misc_feature 5..14: note = DNA
  misc_feature 15..18: note = RNA
tcggctagcttcaatgtc

SEQ ID NO: 161 - DNA, 20 bp, synthetic construct
  source 1..20: mol_type = other DNA
  modified_base 1: mod_base = OTHER; note = 2'-O-methoxyethyl modified methylated cytosine with phosphorothioate linkage
  modified_base 2: mod_base = OTHER; note = 2'-O-methoxyethyl modified methylated cytosine with phosphorothioate linkage
  modified_base 3: mod_base = OTHER; note = 2'-O-methoxyethyl modified nucleotide with phosphorothioate linkage
  modified_base 4: mod_base = OTHER; note = 2'-O-methoxyethyl modified nucleotide with phosphorothioate linkage
  modified_base 5: mod_base = OTHER; note = 2'-O-methoxyethyl modified nucleotide with phosphorothioate linkage
  modified_base 6: mod_base = OTHER; note = Nucleotide with phosphorothioate linkage
  modified_base 7: mod_base = OTHER; note = Nucleotide with phosphorothioate linkage
  modified_base 8: mod_base = OTHER; note = Nucleotide with phosphorothioate linkage
  modified_base 9: mod_base = OTHER; note = Nucleotide with phosphorothioate linkage
  modified_base 10: mod_base = OTHER; note = Nucleotide with phosphorothioate linkage
  modified_base 11: mod_base = OTHER; note = Nucleotide with phosphorothioate linkage
  modified_base 12: mod_base = OTHER; note = Nucleotide with phosphorothioate linkage
  modified_base 13: mod_base = OTHER; note = Nucleotide with phosphorothioate linkage
  modified_base 14: mod_base = OTHER; note = Nucleotide with phosphorothioate linkage
  modified_base 15: mod_base = OTHER; note = Nucleotide with phosphorothioate linkage
  modified_base 16: mod_base = OTHER; note = 2'-O-methoxyethyl modified nucleotide with phosphorothioate linkage
  modified_base 17: mod_base = OTHER; note = 2'-O-methoxyethyl modified thymine with phosphorothioate linkage
  modified_base 18: mod_base = OTHER; note = 2'-O-methoxyethyl modified methylated cytosine with phosphorothioate linkage
  modified_base 19: mod_base = OTHER; note = 2'-O-methoxyethyl modified thymine with phosphorothioate linkage
  modified_base 20: mod_base = OTHER; note = 2'-O-methoxyethyl modified nucleotide
  misc_feature 1..5: note = RNA
  misc_feature 6..15: note = DNA
  misc_feature 16..20: note = RNA
ccggacaagtgcatcatcta

SEQ ID NO: 162 - DNA, 19 bp, synthetic construct
  source 1..19: mol_type = other DNA
  modified_base 1: mod_base = OTHER; note = 2'-O-methoxyethyl modified methylated cytosine with phosphorothioate linkage
  modified_base 2: mod_base = OTHER; note = 2'-O-methoxyethyl modified methylated cytosine with phosphorothioate linkage
  modified_base 3: mod_base = OTHER; note = 2'-O-methoxyethyl modified nucleotide with phosphorothioate linkage
  modified_base 4: mod_base = OTHER; note = 2'-O-methoxyethyl modified nucleotide with phosphorothioate linkage
  modified_base 5: mod_base = OTHER; note = Nucleotide with phosphorothioate linkage
  modified_base 6: mod_base = OTHER; note = Nucleotide with phosphorothioate linkage
  modified_base 7: mod_base = OTHER; note = Nucleotide with phosphorothioate linkage
  modified_base 8: mod_base = OTHER; note = Nucleotide with phosphorothioate linkage
  modified_base 9: mod_base = OTHER; note = Nucleotide with phosphorothioate linkage
  modified_base 10: mod_base = OTHER; note = Nucleotide with phosphorothioate linkage
  modified_base 11: mod_base = OTHER; note = Nucleotide with phosphorothioate linkage
  modified_base 12: mod_base = OTHER; note = Nucleotide with phosphorothioate linkage
  modified_base 13: mod_base = OTHER; note = Nucleotide with phosphorothioate linkage
  modified_base 14: mod_base = OTHER; note = Nucleotide with phosphorothioate linkage
  modified_base 15: mod_base = OTHER; note = 2'-O-methoxyethyl modified methylated cytosine with phosphorothioate linkage
  modified_base 16: mod_base = OTHER; note = 2'-O-methoxyethyl modified nucleotide with phosphorothioate linkage
  modified_base 17: mod_base = OTHER; note = 2'-O-methoxyethyl modified thymine with phosphorothioate linkage
  modified_base 18: mod_base = OTHER; note = 2'-O-methoxyethyl modified methylated cytosine with phosphorothioate linkage
  modified_base 19: mod_base = OTHER; note = 2'-O-methoxyethyl modified thymine
  misc_feature 1..4: note = RNA
  misc_feature 5..14: note = DNA
  misc_feature 15..19: note = RNA
ccggacaagtgcatcatct

SEQ ID NO: 163 - DNA, 20 bp, synthetic construct
  source 1..20: mol_type = other DNA
  modified_base 1: mod_base = OTHER; note = 2'-O-methoxyethyl modified thymine with phosphorothioate linkage
  modified_base 2: mod_base = OTHER; note = 2'-O-methoxyethyl modified methylated cytosine with phosphorothioate linkage
  modified_base 3: mod_base = OTHER; note = 2'-O-methoxyethyl modified nucleotide with phosphorothioate linkage
  modified_base 4: mod_base = OTHER; note = 2'-O-methoxyethyl modified methylated cytosine with phosphorothioate linkage
  modified_base 5: mod_base = OTHER; note = 2'-O-methoxyethyl modified nucleotide with phosphorothioate linkage
  modified_base 6: mod_base = OTHER; note = Nucleotide with phosphorothioate linkage
  modified_base 7: mod_base = OTHER; note = Nucleotide with phosphorothioate linkage
  modified_base 8: mod_base = OTHER; note = Nucleotide with phosphorothioate linkage
  modified_base 9: mod_base = OTHER; note = Nucleotide with phosphorothioate linkage
  modified_base 10: mod_base = OTHER; note = Nucleotide with phosphorothioate linkage
  modified_base 11: mod_base = OTHER; note = Nucleotide with phosphorothioate linkage
  modified_base 12: mod_base = OTHER; note = Nucleotide with phosphorothioate linkage
  modified_base 13: mod_base = OTHER; note = Nucleotide with phosphorothioate linkage
  modified_base 14: mod_base = OTHER; note = Nucleotide with phosphorothioate linkage
  modified_base 15: mod_base = OTHER; note = Nucleotide with phosphorothioate linkage
  modified_base 16: mod_base = OTHER; note = 2'-O-methoxyethyl modified nucleotide with phosphorothioate linkage
  modified_base 17: mod_base = OTHER; note = 2'-O-methoxyethyl modified nucleotide with phosphorothioate linkage
  modified_base 18: mod_base = OTHER; note = 2'-O-methoxyethyl modified thymine with phosphorothioate linkage
  modified_base 19: mod_base = OTHER; note = 2'-O-methoxyethyl modified nucleotide with phosphorothioate linkage
  modified_base 20: mod_base = OTHER; note = 2'-O-methoxyethyl modified nucleotide
  misc_feature 1..5: note = RNA
  misc_feature 6..15: note = DNA
  misc_feature 16..20: note = RNA
tcacattccacgttaggtga

SEQ ID NO: 164 - DNA, 19 bp, synthetic construct
  source 1..19: mol_type = other DNA
  modified_base 1: mod_base = OTHER; note = 2'-O-methoxyethyl modified methylated cytosine with phosphorothioate linkage
  modified_base 2: mod_base = OTHER; note = 2'-O-methoxyethyl modified thymine with phosphorothioate linkage
  modified_base 3: mod_base = OTHER; note = 2'-O-methoxyethyl modified thymine with phosphorothioate linkage
  modified_base 4: mod_base = OTHER; note = 2'-O-methoxyethyl modified methylated cytosine with phosphorothioate linkage
  modified_base 5: mod_base = OTHER; note = Nucleotide with phosphorothioate linkage
  modified_base 6: mod_base = OTHER; note = Nucleotide with phosphorothioate linkage
  modified_base 7: mod_base = OTHER; note = Nucleotide with phosphorothioate linkage
  modified_base 8: mod_base = OTHER; note = Nucleotide with phosphorothioate linkage
  modified_base 9: mod_base = OTHER; note = Nucleotide with phosphorothioate linkage
  modified_base 10: mod_base = OTHER; note = Nucleotide with phosphorothioate linkage
  modified_base 11: mod_base = OTHER; note = Nucleotide with phosphorothioate linkage
  modified_base 12: mod_base = OTHER; note = Nucleotide with phosphorothioate linkage
  modified_base 13: mod_base = OTHER; note = Nucleotide with phosphorothioate linkage
  modified_base 14: mod_base = OTHER; note = Nucleotide with phosphorothioate linkage
  modified_base 15: mod_base = OTHER; note = 2'-O-methoxyethyl modified nucleotide with phosphorothioate linkage
  modified_base 16: mod_base = OTHER; note = 2'-O-methoxyethyl modified nucleotide with phosphorothioate linkage
  modified_base 17: mod_base = OTHER; note = 2'-O-methoxyethyl modified nucleotide with phosphorothioate linkage
  modified_base 18: mod_base = OTHER; note = 2'-O-methoxyethyl modified thymine with phosphorothioate linkage
  modified_base 19: mod_base = OTHER; note = 2'-O-methoxyethyl modified nucleotide
  misc_feature 1..4: note = RNA
  misc_feature 5..14: note = DNA
  misc_feature 15..19: note = RNA
cttctggtctgaataagta

SEQ ID NO: 165 - DNA, 20 bp, synthetic construct
  source 1..20: mol_type = other DNA
  modified_base 1: mod_base = OTHER; note = 2'-O-methoxyethyl modified methylated cytosine with phosphorothioate linkage
  modified_base 2: mod_base = OTHER; note = 2'-O-methoxyethyl modified nucleotide with phosphorothioate linkage
  modified_base 3: mod_base = OTHER; note = 2'-O-methoxyethyl modified nucleotide with phosphorothioate linkage
  modified_base 4: mod_base = OTHER; note = 2'-O-methoxyethyl modified nucleotide with phosphorothioate linkage
  modified_base 5: mod_base = OTHER; note = 2'-O-methoxyethyl modified methylated cytosine with phosphorothioate linkage
  modified_base 6: mod_base = OTHER; note = Nucleotide with phosphorothioate linkage
  modified_base 7: mod_base = OTHER; note = Nucleotide with phosphorothioate linkage
  modified_base 8: mod_base = OTHER; note = Nucleotide with phosphorothioate linkage
  modified_base 9: mod_base = OTHER; note = Nucleotide with phosphorothioate linkage
  modified_base 10: mod_base = OTHER; note = Nucleotide with phosphorothioate linkage
  modified_base 11: mod_base = OTHER; note = Nucleotide with phosphorothioate linkage
  modified_base 12: mod_base = OTHER; note = Nucleotide with phosphorothioate linkage
  modified_base 13: mod_base = OTHER; note = Nucleotide with phosphorothioate linkage
  modified_base 14: mod_base = OTHER; note = Nucleotide with phosphorothioate linkage
  modified_base 15: mod_base = OTHER; note = Nucleotide with phosphorothioate linkage
  modified_base 16: mod_base = OTHER; note = 2'-O-methoxyethyl modified thymine with phosphorothioate linkage
  modified_base 17: mod_base = OTHER; note = 2'-O-methoxyethyl modified methylated cytosine with phosphorothioate linkage
  modified_base 18: mod_base = OTHER; note = 2'-O-methoxyethyl modified thymine with phosphorothioate linkage
  modified_base 19: mod_base = OTHER; note = 2'-O-methoxyethyl modified nucleotide with phosphorothioate linkage
  modified_base 20: mod_base = OTHER; note = 2'-O-methoxyethyl modified thymine
  misc_feature 1..5: note = RNA
  misc_feature 6..15: note = DNA
  misc_feature 16..20: note = RNA
cggacaagtgcatcatctat

SEQ ID NO: 166 - DNA, 20 bp, synthetic construct
  source 1..20: mol_type = other DNA
  modified_base 1: mod_base = OTHER; note = 2'-O-methoxyethyl modified thymine with phosphorothioate linkage
  modified_base 2: mod_base = OTHER; note = 2'-O-methoxyethyl modified nucleotide with phosphorothioate linkage
  modified_base 3: mod_base = OTHER; note = 2'-O-methoxyethyl modified thymine with phosphorothioate linkage
  modified_base 4: mod_base = OTHER; note = 2'-O-methoxyethyl modified nucleotide with phosphorothioate linkage
  modified_base 5: mod_base = OTHER; note = 2'-O-methoxyethyl modified methylated cytosine with phosphorothioate linkage
  modified_base 6: mod_base = OTHER; note = Nucleotide with phosphorothioate linkage
  modified_base 7: mod_base = OTHER; note = Nucleotide with phosphorothioate linkage
  modified_base 8: mod_base = OTHER; note = Nucleotide with phosphorothioate linkage
  modified_base 9: mod_base = OTHER; note = Nucleotide with phosphorothioate linkage
  modified_base 10: mod_base = OTHER; note = Nucleotide with phosphorothioate linkage
  modified_base 11: mod_base = OTHER; note = Nucleotide with phosphorothioate linkage
  modified_base 12: mod_base = OTHER; note = Nucleotide with phosphorothioate linkage
  modified_base 13: mod_base = OTHER; note = Nucleotide with phosphorothioate linkage
  modified_base 14: mod_base = OTHER; note = Nucleotide with phosphorothioate linkage
  modified_base 15: mod_base = OTHER; note = Nucleotide with phosphorothioate linkage
  modified_base 16: mod_base = OTHER; note = 2'-O-methoxyethyl modified thymine with phosphorothioate linkage
  modified_base 17: mod_base = OTHER; note = 2'-O-methoxyethyl modified nucleotide with phosphorothioate linkage
  modified_base 18: mod_base = OTHER; note = 2'-O-methoxyethyl modified thymine with phosphorothioate linkage
  modified_base 19: mod_base = OTHER; note = 2'-O-methoxyethyl modified thymine with phosphorothioate linkage
  modified_base 20: mod_base = OTHER; note = 2'-O-methoxyethyl modified nucleotide
  misc_feature 1..5: note = RNA
  misc_feature 6..15: note = DNA
  misc_feature 16..20: note = RNA
tgtacatgcgaattctattg

SEQ ID NO: 167 - DNA, 20 bp, synthetic construct
  source 1..20: mol_type = other DNA
  modified_base 1: mod_base = OTHER; note = 2'-O-methoxyethyl modified thymine with phosphorothioate linkage
  modified_base 2: mod_base = OTHER; note = 2'-O-methoxyethyl modified methylated cytosine with phosphorothioate linkage
  modified_base 3: mod_base = OTHER; note = 2'-O-methoxyethyl modified methylated cytosine with phosphorothioate linkage
  modified_base 4: mod_base = OTHER; note = 2'-O-methoxyethyl modified nucleotide with phosphorothioate linkage
  modified_base 5: mod_base = OTHER; note = 2'-O-methoxyethyl modified thymine with phosphorothioate linkage
  modified_base 6: mod_base = OTHER; note = Nucleotide with phosphorothioate linkage
  modified_base 7: mod_base = OTHER; note = Nucleotide with phosphorothioate linkage
  modified_base 8: mod_base = OTHER; note = Nucleotide with phosphorothioate linkage
  modified_base 9: mod_base = OTHER; note = Nucleotide with phosphorothioate linkage
  modified_base 10: mod_base = OTHER; note = Nucleotide with phosphorothioate linkage
  modified_base 11: mod_base = OTHER; note = Nucleotide with phosphorothioate linkage
  modified_base 12: mod_base = OTHER; note = Nucleotide with phosphorothioate linkage
  modified_base 13: mod_base = OTHER; note = Nucleotide with phosphorothioate linkage
  modified_base 14: mod_base = OTHER; note = Nucleotide with phosphorothioate linkage
  modified_base 15: mod_base = OTHER; note = Nucleotide with phosphorothioate linkage
  modified_base 16: mod_base = OTHER; note = 2'-O-methoxyethyl modified thymine with phosphorothioate linkage
  modified_base 17: mod_base = OTHER; note = 2'-O-methoxyethyl modified methylated cytosine with phosphorothioate linkage
  modified_base 18: mod_base = OTHER; note = 2'-O-methoxyethyl modified thymine with phosphorothioate linkage
  modified_base 19: mod_base = OTHER; note = 2'-O-methoxyethyl modified nucleotide with phosphorothioate linkage
  modified_base 20: mod_base = OTHER; note = 2'-O-methoxyethyl modified nucleotide
  misc_feature 1..5: note = RNA
  misc_feature 6..15: note = DNA
  misc_feature 16..20: note = RNA
tccatagcgatcatctctag

SEQ ID NO: 168 - DNA, 20 bp, synthetic construct
  source 1..20: mol_type = other DNA
  modified_base 1: mod_base = OTHER; note = 2'-O-methoxyethyl modified thymine with phosphorothioate linkage
  modified_base 2: mod_base = OTHER; note = 2'-O-methoxyethyl modified thymine with phosphorothioate linkage
  modified_base 3: mod_base = OTHER; note = 2'-O-methoxyethyl modified methylated cytosine with phosphorothioate linkage
  modified_base 4: mod_base = OTHER; note = 2'-O-methoxyethyl modified methylated cytosine with phosphorothioate linkage
  modified_base 5: mod_base = OTHER; note = 2'-O-methoxyethyl modified nucleotide with phosphorothioate linkage
  modified_base 6: mod_base = OTHER; note = Nucleotide with phosphorothioate linkage
  modified_base 7: mod_base = OTHER; note = Nucleotide with phosphorothioate linkage
  modified_base 8: mod_base = OTHER; note = Nucleotide with phosphorothioate linkage
  modified_base 9: mod_base = OTHER; note = Nucleotide with phosphorothioate linkage
  modified_base 10: mod_base = OTHER; note = Nucleotide with phosphorothioate linkage
  modified_base 11: mod_base = OTHER; note = Nucleotide with phosphorothioate linkage
  modified_base 12: mod_base = OTHER; note = Nucleotide with phosphorothioate linkage
  modified_base 13: mod_base = OTHER; note = Nucleotide with phosphorothioate linkage
  modified_base 14: mod_base = OTHER; note = Nucleotide with phosphorothioate linkage
  modified_base 15: mod_base = OTHER; note = Nucleotide with phosphorothioate linkage
  modified_base 16: mod_base = OTHER; note = 2'-O-methoxyethyl modified nucleotide with phosphorothioate linkage
  modified_base 17: mod_base = OTHER; note = 2'-O-methoxyethyl modified thymine with phosphorothioate linkage
  modified_base 18: mod_base = OTHER; note = 2'-O-methoxyethyl modified nucleotide with phosphorothioate linkage
  modified_base 19: mod_base = OTHER; note = 2'-O-methoxyethyl modified nucleotide with phosphorothioate linkage
  modified_base 20: mod_base = OTHER; note = 2'-O-methoxyethyl modified nucleotide
  misc_feature 1..5: note = RNA
  misc_feature 6..15: note = DNA
  misc_feature 16..20: note = RNA
ttccggcttccacatataag

SEQ ID NO: 169 - DNA, 18 bp, synthetic construct
  source 1..18: mol_type = other DNA
  modified_base 1: mod_base = OTHER; note = 2'-O-methoxyethyl modified methylated cytosine with phosphorothioate linkage
  modified_base 2: mod_base = OTHER; note = 2'-O-methoxyethyl modified nucleotide with phosphorothioate linkage
  modified_base 3: mod_base = OTHER; note = 2'-O-methoxyethyl modified thymine with phosphorothioate linkage
  modified_base 4: mod_base = OTHER; note = 2'-O-methoxyethyl modified thymine with phosphorothioate linkage
  modified_base 5: mod_base = OTHER; note = Nucleotide with phosphorothioate linkage
  modified_base 6: mod_base = OTHER; note = Nucleotide with phosphorothioate linkage
  modified_base 7: mod_base = OTHER; note = Nucleotide with phosphorothioate linkage
  modified_base 8: mod_base = OTHER; note = Nucleotide with phosphorothioate linkage
  modified_base 9: mod_base = OTHER; note = Nucleotide with phosphorothioate linkage
  modified_base 10: mod_base = OTHER; note = Nucleotide with phosphorothioate linkage
  modified_base 11: mod_base = OTHER; note = Nucleotide with phosphorothioate linkage
  modified_base 12: mod_base = OTHER; note = Nucleotide with phosphorothioate linkage
  modified_base 13: mod_base = OTHER; note = Nucleotide with phosphorothioate linkage
  modified_base 14: mod_base = OTHER; note = Nucleotide with phosphorothioate linkage
  modified_base 15: mod_base = OTHER; note = 2'-O-methoxyethyl modified nucleotide with phosphorothioate linkage
  modified_base 16: mod_base = OTHER; note = 2'-O-methoxyethyl modified nucleotide with phosphorothioate linkage
  modified_base 17: mod_base = OTHER; note = 2'-O-methoxyethyl modified thymine with phosphorothioate linkage
  modified_base 18: mod_base = OTHER; note = 2'-O-methoxyethyl modified methylated cytosine
  misc_feature 1..4: note = RNA
  misc_feature 5..14: note = DNA
  misc_feature 15..18: note = RNA
cattctccgaatctggtc

SEQ ID NO: 170 - DNA, 20 bp, synthetic construct
  source 1..20: mol_type = other DNA
  modified_base 1: mod_base = OTHER; note = 2'-O-methoxyethyl modified methylated cytosine with phosphorothioate linkage
  modified_base 2: mod_base = OTHER; note = 2'-O-methoxyethyl modified methylated cytosine with phosphorothioate linkage
  modified_base 3: mod_base = OTHER; note = 2'-O-methoxyethyl modified thymine with phosphorothioate linkage
  modified_base 4: mod_base = OTHER; note = 2'-O-methoxyethyl modified thymine with phosphorothioate linkage
  modified_base 5: mod_base = OTHER; note = 2'-O-methoxyethyl modified methylated cytosine with phosphorothioate linkage
  modified_base 6: mod_base = OTHER; note = Nucleotide with phosphorothioate linkage
  modified_base 7: mod_base = OTHER; note = Nucleotide with phosphorothioate linkage
  modified_base 8: mod_base = OTHER; note = Nucleotide with phosphorothioate linkage
  modified_base 9: mod_base = OTHER; note = Nucleotide with phosphorothioate linkage
  modified_base 10: mod_base = OTHER; note = Nucleotide with phosphorothioate linkage
  modified_base 11: mod_base = OTHER; note = Nucleotide with phosphorothioate linkage
  modified_base 12: mod_base = OTHER; note = Nucleotide with phosphorothioate linkage
  modified_base 13: mod_base = OTHER; note = Nucleotide with phosphorothioate linkage
  modified_base 14: mod_base = OTHER; note = Nucleotide with phosphorothioate linkage
  modified_base 15: mod_base = OTHER; note = Nucleotide with phosphorothioate linkage
  modified_base 16: mod_base = OTHER; note = 2'-O-methoxyethyl modified thymine with phosphorothioate linkage
  modified_base 17: mod_base = OTHER; note = 2'-O-methoxyethyl modified thymine with phosphorothioate linkage
  modified_base 18: mod_base = OTHER; note = 2'-O-methoxyethyl modified nucleotide with phosphorothioate linkage
  modified_base 19: mod_base = OTHER; note = 2'-O-methoxyethyl modified thymine with phosphorothioate linkage
  modified_base 20: mod_base = OTHER; note = 2'-O-methoxyethyl modified nucleotide
  misc_feature 1..5: note = RNA
  misc_feature 6..15: note = DNA
  misc_feature 16..20: note = RNA
ccttcctgttttcatttgta

SEQ ID NO: 171 - DNA, 20 bp, synthetic construct
  source 1..20: mol_type = other DNA
  modified_base 1: mod_base = OTHER; note = 2'-O-methoxyethyl modified methylated cytosine with phosphorothioate linkage
  modified_base 2: mod_base = OTHER; note = 2'-O-methoxyethyl modified methylated cytosine with phosphorothioate linkage
  modified_base 3: mod_base = OTHER; note = 2'-O-methoxyethyl modified thymine with phosphorothioate linkage
  modified_base 4: mod_base = OTHER; note = 2'-O-methoxyethyl modified thymine with phosphorothioate linkage
  modified_base 5: mod_base = OTHER; note = 2'-O-methoxyethyl modified thymine with phosphorothioate linkage
  modified_base 6: mod_base = OTHER; note = Nucleotide with phosphorothioate linkage
  modified_base 7: mod_base = OTHER; note = Nucleotide with phosphorothioate linkage
  modified_base 8: mod_base = OTHER; note = Nucleotide with phosphorothioate linkage
  modified_base 9: mod_base = OTHER; note = Nucleotide with phosphorothioate linkage
  modified_base 10: mod_base = OTHER; note = Nucleotide with phosphorothioate linkage
  modified_base 11: mod_base = OTHER; note = Nucleotide with phosphorothioate linkage
  modified_base 12: mod_base = OTHER; note = Nucleotide with phosphorothioate linkage
  modified_base 13: mod_base = OTHER; note = Nucleotide with phosphorothioate linkage
  modified_base 14: mod_base = OTHER; note = Nucleotide with phosphorothioate linkage
  modified_base 15: mod_base = OTHER; note = Nucleotide with phosphorothioate linkage
  modified_base 16: mod_base = OTHER; note = 2'-O-methoxyethyl modified nucleotide with phosphorothioate linkage
  modified_base 17: mod_base = OTHER; note = 2'-O-methoxyethyl modified methylated cytosine with phosphorothioate linkage
  modified_base 18: mod_base = OTHER; note = 2'-O-methoxyethyl modified methylated cytosine with phosphorothioate linkage
  modified_base 19: mod_base = OTHER; note = 2'-O-methoxyethyl modified nucleotide with phosphorothioate linkage
  modified_base 20: mod_base = OTHER; note = 2'-O-methoxyethyl modified thymine
  misc_feature 1..5: note = RNA
  misc_feature 6..15: note = DNA
  misc_feature 16..20: note = RNA
cctttctgtgtctgggccat

SEQ ID NO: 172 - DNA, 20 bp, synthetic construct
  source 1..20: mol_type = other DNA
  modified_base 1: mod_base = OTHER; note = 2'-O-methoxyethyl modified methylated cytosine with phosphorothioate linkage
  modified_base 2: mod_base = OTHER; note = 2'-O-methoxyethyl modified thymine with phosphorothioate linkage
  modified_base 3: mod_base = OTHER; note = 2'-O-methoxyethyl modified methylated cytosine with phosphorothioate linkage
  modified_base 4: mod_base = OTHER; note = 2'-O-methoxyethyl modified thymine with phosphorothioate linkage
  modified_base 5: mod_base = OTHER; note = 2'-O-methoxyethyl modified thymine with phosphorothioate linkage
  modified_base 6: mod_base = OTHER; note = Nucleotide with phosphorothioate linkage
  modified_base 7: mod_base = OTHER; note = Nucleotide with phosphorothioate linkage
  modified_base 8: mod_base = OTHER; note = Nucleotide with phosphorothioate linkage
  modified_base 9: mod_base = OTHER; note = Nucleotide with phosphorothioate linkage
  modified_base 10: mod_base = OTHER; note = Nucleotide with phosphorothioate linkage
  modified_base 11: mod_base = OTHER; note = Nucleotide with phosphorothioate linkage
  modified_base 12: mod_base = OTHER; note = Nucleotide with phosphorothioate linkage
  modified_base 13: mod_base = OTHER; note = Nucleotide with phosphorothioate linkage
  modified_base 14: mod_base = OTHER; note = Nucleotide with phosphorothioate linkage
  modified_base 15: mod_base = OTHER; note = Nucleotide with phosphorothioate linkage
  modified_base 16: mod_base = OTHER; note = 2'-O-methoxyethyl modified nucleotide with phosphorothioate linkage
  modified_base 17: mod_base = OTHER; note = 2'-O-methoxyethyl modified nucleotide with phosphorothioate linkage
  modified_base 18: mod_base = OTHER; note = 2'-O-methoxyethyl modified methylated cytosine with phosphorothioate linkage
  modified_base 19: mod_base = OTHER; note = 2'-O-methoxyethyl modified methylated cytosine with phosphorothioate linkage
  modified_base 20: mod_base = OTHER; note = 2'-O-methoxyethyl modified thymine
  misc_feature 1..5: note = RNA
  misc_feature 6..15: note = DNA
  misc_feature 16..20: note = RNA
ctcttacagatttttaacct

SEQ ID NO: 173 - DNA, 20 bp, synthetic construct
  source 1..20: mol_type = other DNA
  modified_base 1: mod_base = OTHER; note = 2'-O-methoxyethyl modified thymine with phosphorothioate linkage
  modified_base 2: mod_base = OTHER; note = 2'-O-methoxyethyl modified nucleotide with phosphorothioate linkage
  modified_base 3: mod_base = OTHER; note = 2'-O-methoxyethyl modified nucleotide with phosphorothioate linkage
  modified_base 4: mod_base = OTHER; note = 2'-O-methoxyethyl modified nucleotide with phosphorothioate linkage
  modified_base 5: mod_base = OTHER; note = 2'-O-methoxyethyl modified thymine with phosphorothioate linkage
  modified_base 6: mod_base = OTHER; note = Nucleotide with phosphorothioate linkage
  modified_base 7: mod_base = OTHER; note = Nucleotide with phosphorothioate linkage
  modified_base 8: mod_base = OTHER; note = Nucleotide with phosphorothioate linkage
  modified_base 9: mod_base = OTHER; note = Nucleotide with phosphorothioate linkage
  modified_base 10: mod_base = OTHER; note = Nucleotide with phosphorothioate linkage
  modified_base 11: mod_base = OTHER; note = Nucleotide with phosphorothioate linkage
  modified_base 12: mod_base = OTHER; note = Nucleotide with phosphorothioate linkage
  modified_base 13: mod_base = OTHER; note = Nucleotide with phosphorothioate linkage
  modified_base 14: mod_base = OTHER; note = Nucleotide with phosphorothioate linkage
  modified_base 15: mod_base = OTHER; note = Nucleotide with phosphorothioate linkage
  modified_base 16: mod_base = OTHER; note = 2'-O-methoxyethyl modified thymine with phosphorothioate linkage
  modified_base 17: mod_base = OTHER; note = 2'-O-methoxyethyl modified nucleotide with phosphorothioate linkage
  modified_base 18: mod_base = OTHER; note = 2'-O-methoxyethyl modified thymine with phosphorothioate linkage
  modified_base 19: mod_base = OTHER; note = 2'-O-methoxyethyl modified methylated cytosine with phosphorothioate linkage
  modified_base 20: mod_base = OTHER; note = 2'-O-methoxyethyl modified thymine
  misc_feature 1..5: note = RNA
  misc_feature 6..15: note = DNA
  misc_feature 16..20: note = RNA
taggtaacctttctgtgtct

SEQ ID NO: 174 - DNA, 20 bp, synthetic construct
  source 1..20: mol_type = other DNA
  modified_base 1: mod_base = OTHER; note = 2'-O-methoxyethyl modified nucleotide with phosphorothioate linkage
  modified_base 2: mod_base = OTHER; note = 2'-O-methoxyethyl modified thymine with phosphorothioate linkage
  modified_base 3: mod_base = OTHER; note = 2'-O-methoxyethyl modified nucleotide with phosphorothioate linkage
  modified_base 4: mod_base = OTHER; note = 2'-O-methoxyethyl modified nucleotide with phosphorothioate linkage
  modified_base 5: mod_base = OTHER; note = 2'-O-methoxyethyl modified nucleotide with phosphorothioate linkage
  modified_base 6: mod_base = OTHER; note = Nucleotide with phosphorothioate linkage
  modified_base 7: mod_base = OTHER; note = Nucleotide with phosphorothioate linkage
  modified_base 8: mod_base = OTHER; note = Nucleotide with phosphorothioate linkage
  modified_base 9: mod_base = OTHER; note = Nucleotide with phosphorothioate linkage
  modified_base 10: mod_base = OTHER; note = Nucleotide with phosphorothioate linkage
  modified_base 11: mod_base = OTHER; note = Nucleotide with phosphorothioate linkage
  modified_base 12: mod_base = OTHER; note = Nucleotide with phosphorothioate linkage
  modified_base 13: mod_base = OTHER; note = Nucleotide with phosphorothioate linkage
  modified_base 14: mod_base = OTHER; note = Nucleotide with phosphorothioate linkage
  modified_base 15: mod_base = OTHER; note = Nucleotide with phosphorothioate linkage
  modified_base 16: mod_base = OTHER; note = 2'-O-methoxyethyl modified thymine with phosphorothioate linkage
  modified_base 17: mod_base = OTHER; note = 2'-O-methoxyethyl modified methylated cytosine with phosphorothioate linkage
  modified_base 18: mod_base = OTHER; note = 2'-O-methoxyethyl modified thymine with phosphorothioate linkage
  modified_base 19: mod_base = OTHER; note = 2'-O-methoxyethyl modified nucleotide with phosphorothioate linkage
  modified_base 20: mod_base = OTHER; note = 2'-O-methoxyethyl modified nucleotide
  misc_feature 1..5: note = RNA
  misc_feature 6..15: note = DNA
  misc_feature 16..20: note = RNA
gtgaacataccaatatctgg

SEQ ID NO: 175 - DNA, 19 bp, synthetic construct
  source 1..19: mol_type = other DNA
  modified_base 1: mod_base = OTHER; note = 2'-O-methoxyethyl modified nucleotide with phosphorothioate linkage
  modified_base 2: mod_base = OTHER; note = 2'-O-methoxyethyl modified thymine with phosphorothioate linkage
  modified_base 3: mod_base = OTHER; note = 2'-O-methoxyethyl modified nucleotide with phosphorothioate linkage
  modified_base 4: mod_base = OTHER; note = 2'-O-methoxyethyl modified thymine with phosphorothioate linkage
  modified_base 5: mod_base = OTHER; note = Nucleotide with phosphorothioate linkage
  modified_base 6: mod_base = OTHER; note = Nucleotide with phosphorothioate linkage
  modified_base 7: mod_base = OTHER; note = Nucleotide with phosphorothioate linkage
  modified_base 8: mod_base = OTHER; note = Nucleotide with phosphorothioate linkage
  modified_base 9: mod_base = OTHER; note = Nucleotide with phosphorothioate linkage
  modified_base 10: mod_base = OTHER; note = Nucleotide with phosphorothioate linkage
  modified_base 11: mod_base = OTHER; note = Nucleotide with phosphorothioate linkage
  modified_base 12: mod_base = OTHER; note = Nucleotide with phosphorothioate linkage
  modified_base 13: mod_base = OTHER; note = Nucleotide with phosphorothioate linkage
  modified_base 14: mod_base = OTHER; note = Nucleotide with phosphorothioate linkage
  modified_base 15: mod_base = OTHER; note = 2'-O-methoxyethyl modified thymine with phosphorothioate linkage
  modified_base 16: mod_base = OTHER; note = 2'-O-methoxyethyl modified nucleotide with phosphorothioate linkage
  modified_base 17: mod_base = OTHER; note = 2'-O-methoxyethyl modified nucleotide with phosphorothioate linkage
  modified_base 18: mod_base = OTHER; note = 2'-O-methoxyethyl modified methylated cytosine with phosphorothioate linkage
  modified_base 19: mod_base = OTHER; note = 2'-O-methoxyethyl modified methylated cytosine
  misc_feature 1..4: note = RNA
  misc_feature 5..14: note = DNA
  misc_feature 15..19: note = RNA
gtatgagatgtaggtaacc

SEQ ID NO: 176 - DNA, 20 bp, synthetic construct
  source 1..20: mol_type = other DNA
  modified_base 1: mod_base = OTHER; note = 2'-O-methoxyethyl modified nucleotide with phosphorothioate linkage
  modified_base 2: mod_base = OTHER; note = 2'-O-methoxyethyl modified methylated cytosine with phosphorothioate linkage
  modified_base 3: mod_base = OTHER; note = 2'-O-methoxyethyl modified nucleotide with phosphorothioate linkage
  modified_base 4: mod_base = OTHER; note = 2'-O-methoxyethyl modified nucleotide with phosphorothioate linkage
  modified_base 5: mod_base = OTHER; note = 2'-O-methoxyethyl modified nucleotide with phosphorothioate linkage
  modified_base 6: mod_base = OTHER; note = Nucleotide with phosphorothioate linkage
  modified_base 7: mod_base = OTHER; note = Nucleotide with phosphorothioate linkage
  modified_base 8: mod_base = OTHER; note = Nucleotide with phosphorothioate linkage
  modified_base 9: mod_base = OTHER; note = Nucleotide with phosphorothioate linkage
  modified_base 10: mod_base = OTHER; note = Nucleotide with phosphorothioate linkage
  modified_base 11: mod_base = OTHER; note = Nucleotide with phosphorothioate linkage
  modified_base 12: mod_base = OTHER; note = Nucleotide with phosphorothioate linkage
  modified_base 13: mod_base = OTHER; note = Nucleotide with phosphorothioate linkage
  modified_base 14: mod_base = OTHER; note = Nucleotide with phosphorothioate linkage
  modified_base 15: mod_base = OTHER; note = Nucleotide with phosphorothioate linkage
  modified_base 16: mod_base = OTHER; note = 2'-O-methoxyethyl modified nucleotide with phosphorothioate linkage
  modified_base 17: mod_base = OTHER; note = 2'-O-methoxyethyl modified nucleotide with phosphorothioate linkage
  modified_base 18: mod_base = OTHER; note = 2'-O-methoxyethyl modified thymine with phosphorothioate linkage
  modified_base 19: mod_base = OTHER; note = 2'-O-methoxyethyl modified methylated cytosine with phosphorothioate linkage
  modified_base 20: mod_base = OTHER; note = 2'-O-methoxyethyl modified thymine
  misc_feature 1..5: note = RNA
  misc_feature 6..15: note = DNA
  misc_feature 16..20: note = RNA
acaggttgtcacaccagtct

SEQ ID NO: 177 - DNA, 20 bp, synthetic construct
  source 1..20: mol_type = other DNA
  modified_base 1: mod_base = OTHER; note = 2'-O-methoxyethyl modified nucleotide with phosphorothioate linkage
  modified_base 2: mod_base = OTHER; note = 2'-O-methoxyethyl modified nucleotide with phosphorothioate linkage
  modified_base 3: mod_base = OTHER; note = 2'-O-methoxyethyl modified thymine with phosphorothioate linkage
  modified_base 4: mod_base = OTHER; note = 2'-O-methoxyethyl modified nucleotide with phosphorothioate linkage
  modified_base 5: mod_base = OTHER; note = 2'-O-methoxyethyl modified thymine with phosphorothioate linkage
  modified_base 6: mod_base = OTHER; note = Nucleotide with phosphorothioate linkage
  modified_base 7: mod_base = OTHER; note = Nucleotide with phosphorothioate linkage
  modified_base 8: mod_base = OTHER; note = Nucleotide with phosphorothioate linkage
  modified_base 9: mod_base = OTHER; note = Nucleotide with phosphorothioate linkage
  modified_base 10: mod_base = OTHER; note = Nucleotide with phosphorothioate linkage
  modified_base 11: mod_base = OTHER; note = Nucleotide with phosphorothioate linkage
  modified_base 12: mod_base = OTHER; note = Nucleotide with phosphorothioate linkage
  modified_base 13: mod_base = OTHER; note = Nucleotide with phosphorothioate linkage
  modified_base 14: mod_base = OTHER; note = Nucleotide with phosphorothioate linkage
  modified_base 15: mod_base = OTHER; note = Nucleotide with phosphorothioate linkage
  modified_base 16: mod_base = OTHER; note = 2'-O-methoxyethyl modified thymine with phosphorothioate linkage
  modified_base 17: mod_base = OTHER; note = 2'-O-methoxyethyl modified nucleotide with phosphorothioate linkage
  modified_base 18: mod_base = OTHER; note = 2'-O-methoxyethyl modified nucleotide with phosphorothioate linkage
  modified_base 19: mod_base = OTHER; note = 2'-O-methoxyethyl modified methylated cytosine with phosphorothioate linkage
  modified_base 20: mod_base = OTHER; note = 2'-O-methoxyethyl modified methylated cytosine
  misc_feature 1..5: note = RNA
  misc_feature 6..15: note = DNA
  misc_feature 16..20: note = RNA
agtatgagatgtaggtaacc

SEQ ID NO: 178 - DNA, 20 bp, synthetic construct
  source 1..20: mol_type = other DNA
  modified_base 1: mod_base = OTHER; note = 2'-O-methoxyethyl modified nucleotide with phosphorothioate linkage
  modified_base 2: mod_base = OTHER; note = 2'-O-methoxyethyl modified nucleotide with phosphorothioate linkage
  modified_base 3: mod_base = OTHER; note = 2'-O-methoxyethyl modified methylated cytosine with phosphorothioate linkage
  modified_base 4: mod_base = OTHER; note = 2'-O-methoxyethyl modified thymine with phosphorothioate linkage
  modified_base 5: mod_base = OTHER; note = 2'-O-methoxyethyl modified nucleotide with phosphorothioate linkage
  modified_base 6: mod_base = OTHER; note = Nucleotide with phosphorothioate linkage
  modified_base 7: mod_base = OTHER; note = Nucleotide with phosphorothioate linkage
  modified_base 8: mod_base = OTHER; note = Nucleotide with phosphorothioate linkage
  modified_base 9: mod_base = OTHER; note = Nucleotide with phosphorothioate linkage
  modified_base 10: mod_base = OTHER; note = Nucleotide with phosphorothioate linkage
  modified_base 11: mod_base = OTHER; note = Nucleotide with phosphorothioate linkage
  modified_base 12: mod_base = OTHER; note = Nucleotide with phosphorothioate linkage
  modified_base 13: mod_base = OTHER; note = Nucleotide with phosphorothioate linkage
  modified_base 14: mod_base = OTHER; note = Nucleotide with phosphorothioate linkage
  modified_base 15: mod_base = OTHER; note = Nucleotide with phosphorothioate linkage
  modified_base 16: mod_base = OTHER; note = 2'-O-methoxyethyl modified nucleotide with phosphorothioate linkage
  modified_base 17: mod_base = OTHER; note = 2'-O-methoxyethyl modified thymine with phosphorothioate linkage
  modified_base 18: mod_base = OTHER; note = 2'-O-methoxyethyl modified nucleotide with phosphorothioate linkage
  modified_base 19: mod_base = OTHER; note = 2'-O-methoxyethyl modified nucleotide with phosphorothioate linkage
  modified_base 20: mod_base = OTHER; note = 2'-O-methoxyethyl modified methylated cytosine
  misc_feature 1..5: note = RNA
  misc_feature 6..15: note = DNA
  misc_feature 16..20: note = RNA
agctgtggccattcggtgac

SEQ ID NO: 179 - DNA, 19 bp, synthetic construct
  source 1..19: mol_type = other DNA
  modified_base 1: mod_base = OTHER; note = 2'-O-methoxyethyl modified methylated cytosine with phosphorothioate linkage
  modified_base 2: mod_base = OTHER; note = 2'-O-methoxyethyl modified nucleotide with phosphorothioate linkage
  modified_base 3: mod_base = OTHER; note = 2'-O-methoxyethyl modified nucleotide with phosphorothioate linkage
  modified_base 4: mod_base = OTHER; note = 2'-O-methoxyethyl modified nucleotide with phosphorothioate linkage
  modified_base 5: mod_base = OTHER; note = Nucleotide with phosphorothioate linkage
  modified_base 6: mod_base = OTHER; note = Nucleotide with phosphorothioate linkage
  modified_base 7: mod_base = OTHER; note = Nucleotide with phosphorothioate linkage
  modified_base 8: mod_base = OTHER; note = Nucleotide with phosphorothioate linkage
  modified_base 9: mod_base = OTHER; note = Nucleotide with phosphorothioate linkage
  modified_base 10: mod_base = OTHER; note = Nucleotide with phosphorothioate linkage
  modified_base 11: mod_base = OTHER; note = Nucleotide with phosphorothioate linkage
  modified_base 12: mod_base = OTHER; note = Nucleotide with phosphorothioate linkage
  modified_base 13: mod_base = OTHER; note = Nucleotide with phosphorothioate linkage
  modified_base 14: mod_base = OTHER; note = Nucleotide with phosphorothioate linkage
  modified_base 15: mod_base = OTHER; note = 2'-O-methoxyethyl modified nucleotide with phosphorothioate linkage
  modified_base 16: mod_base = OTHER; note = 2'-O-methoxyethyl modified nucleotide with phosphorothioate linkage
  modified_base 17: mod_base = OTHER; note = 2'-O-methoxyethyl modified nucleotide with phosphorothioate linkage
  modified_base 18: mod_base = OTHER; note = 2'-O-methoxyethyl modified thymine with phosphorothioate linkage
  modified_base 19: mod_base = OTHER; note = 2'-O-methoxyethyl modified nucleotide
  misc_feature 1..4: note = RNA
  misc_feature 5..14: note = DNA
  misc_feature 15..19: note = RNA
caagtatgagatgtaggta

SEQ ID NO: 180 - DNA, 20 bp, synthetic construct
  source 1..20: mol_type = other DNA
  modified_base 1: mod_base = OTHER; note = 2'-O-methoxyethyl modified nucleotide with phosphorothioate linkage
  modified_base 2: mod_base = OTHER; note = 2'-O-methoxyethyl modified nucleotide with phosphorothioate linkage
  modified_base 3: mod_base = OTHER; note = 2'-O-methoxyethyl modified thymine with phosphorothioate linkage
  modified_base 4: mod_base = OTHER; note = 2'-O-methoxyethyl modified nucleotide with phosphorothioate linkage
  modified_base 5: mod_base = OTHER; note = 2'-O-methoxyethyl modified nucleotide with phosphorothioate linkage
  modified_base 6: mod_base = OTHER; note = Nucleotide with phosphorothioate linkage
  modified_base 7: mod_base = OTHER; note = Nucleotide with phosphorothioate linkage
  modified_base 8: mod_base = OTHER; note = Nucleotide with phosphorothioate linkage
  modified_base 9: mod_base = OTHER; note = Nucleotide with phosphorothioate linkage
  modified_base 10: mod_base = OTHER; note = Nucleotide with phosphorothioate linkage
  modified_base 11: mod_base = OTHER; note = Nucleotide with phosphorothioate linkage
  modified_base 12: mod_base = OTHER; note = Nucleotide with phosphorothioate linkage
  modified_base 13: mod_base = OTHER; note = Nucleotide with phosphorothioate linkage
  modified_base 14: mod_base = OTHER; note = Nucleotide with phosphorothioate linkage
  modified_base 15: mod_base = OTHER; note = Nucleotide with phosphorothioate linkage
  modified_base 16: mod_base = OTHER; note = 2'-O-methoxyethyl modified nucleotide with phosphorothioate linkage
  modified_base 17: mod_base = OTHER; note = 2'-O-methoxyethyl modified methylated cytosine with phosphorothioate linkage
  modified_base 18: mod_base = OTHER; note = 2'-O-methoxyethyl modified nucleotide with phosphorothioate linkage
  modified_base 19: mod_base = OTHER; note = 2'-O-methoxyethyl modified nucleotide with phosphorothioate linkage
  modified_base 20: mod_base = OTHER; note = 2'-O-methoxyethyl modified thymine
  misc_feature 1..5: note = RNA
  misc_feature 6..15: note = DNA
  misc_feature 16..20: note = RNA
gataagtggttttcgacaat

SEQ ID NO: 181 - DNA, 20 bp, synthetic construct
  source 1..20: mol_type = other DNA
  modified_base 1: mod_base = OTHER; note = 2'-O-methoxyethyl modified methylated cytosine with phosphorothioate linkage
  modified_base 2: mod_base = OTHER; note = 2'-O-methoxyethyl modified nucleotide with phosphorothioate linkage
  modified_base 3: mod_base = OTHER; note = 2'-O-methoxyethyl modified nucleotide with phosphorothioate linkage
  modified_base 4: mod_base = OTHER; note = 2'-O-methoxyethyl modified nucleotide with phosphorothioate linkage
  modified_base 5: mod_base = OTHER; note = 2'-O-methoxyethyl modified methylated cytosine with phosphorothioate linkage
  modified_base 6: mod_base = OTHER; note = Nucleotide with phosphorothioate linkage
  modified_base 7: mod_base = OTHER; note = Nucleotide with phosphorothioate linkage
  modified_base 8: mod_base = OTHER; note = Nucleotide with phosphorothioate linkage
  modified_base 9: mod_base = OTHER; note = Nucleotide with phosphorothioate linkage
  modified_base 10: mod_base = OTHER; note = Nucleotide with phosphorothioate linkage
  modified_base 11: mod_base = OTHER; note = Nucleotide with phosphorothioate linkage
  modified_base 12: mod_base = OTHER; note = Nucleotide with phosphorothioate linkage
  modified_base 13: mod_base = OTHER; note = Nucleotide with phosphorothioate linkage
  modified_base 14: mod_base = OTHER; note = Nucleotide with phosphorothioate linkage
  modified_base 15: mod_base = OTHER; note = Nucleotide with phosphorothioate linkage
  modified_base 16: mod_base = OTHER; note = 2'-O-methoxyethyl modified thymine with phosphorothioate linkage
  modified_base 17: mod_base = OTHER; note = 2'-O-methoxyethyl modified methylated cytosine with phosphorothioate linkage
  modified_base 18: mod_base = OTHER; note = 2'-O-methoxyethyl modified thymine with phosphorothioate linkage
  modified_base 19: mod_base = OTHER; note = 2'-O-methoxyethyl modified nucleotide with phosphorothioate linkage
  modified_base 20: mod_base = OTHER; note = 2'-O-methoxyethyl modified thymine
  misc_feature 1..5: note = RNA
  misc_feature 6..15: note = DNA
  misc_feature 16..20: note = RNA
cggacaagtgcatcatctat

SEQ ID NO: 182 - DNA, 19 bp, synthetic construct
  source 1..19: mol_type = other DNA
  modified_base 1: mod_base = OTHER; note = 2'-O-methoxyethyl modified methylated cytosine with phosphorothioate linkage
  modified_base 2: mod_base = OTHER; note = 2'-O-methoxyethyl modified methylated cytosine with phosphorothioate linkage
  modified_base 3: mod_base = OTHER; note = 2'-O-methoxyethyl modified nucleotide with phosphorothioate linkage
  modified_base 4: mod_base = OTHER; note = 2'-O-methoxyethyl modified nucleotide with phosphorothioate linkage
  modified_base 5: mod_base = OTHER; note = Nucleotide with phosphorothioate linkage
  modified_base 6: mod_base = OTHER; note = Nucleotide with phosphorothioate linkage
  modified_base 7: mod_base = OTHER; note = Nucleotide with phosphorothioate linkage
  modified_base 8: mod_base = OTHER; note = Nucleotide with phosphorothioate linkage
  modified_base 9: mod_base = OTHER; note = Nucleotide with phosphorothioate linkage
  modified_base 10: mod_base = OTHER; note = Nucleotide with phosphorothioate linkage
  modified_base 11: mod_base = OTHER; note = Nucleotide with phosphorothioate linkage
  modified_base 12: mod_base = OTHER; note = Nucleotide with phosphorothioate linkage
  modified_base 13: mod_base = OTHER; note = Nucleotide with phosphorothioate linkage
  modified_base 14: mod_base = OTHER; note = Nucleotide with phosphorothioate linkage
  modified_base 15: mod_base = OTHER; note = 2'-O-methoxyethyl modified methylated cytosine with phosphorothioate linkage
  modified_base 16: mod_base = OTHER; note = 2'-O-methoxyethyl modified nucleotide with phosphorothioate linkage
  modified_base 17: mod_base = OTHER; note = 2'-O-methoxyethyl modified thymine with phosphorothioate linkage
  modified_base 18: mod_base = OTHER; note = 2'-O-methoxyethyl modified methylated cytosine with phosphorothioate linkage
  modified_base 19: mod_base = OTHER; note = 2'-O-methoxyethyl modified thymine
  misc_feature 1..4: note = RNA
  misc_feature 5..14: note = DNA
  misc_feature 15..19: note = RNA
ccggacaagtgcatcatct

SEQ ID NO: 183 - DNA, 19 bp, synthetic construct
  source 1..19: mol_type = other DNA
  modified_base 1: mod_base = OTHER; note = 2'-O-methoxyethyl modified nucleotide with phosphorothioate linkage
  modified_base 2: mod_base = OTHER; note = 2'-O-methoxyethyl modified thymine with phosphorothioate linkage
  modified_base 3: mod_base = OTHER; note = 2'-O-methoxyethyl modified nucleotide with phosphorothioate linkage
  modified_base 4: mod_base = OTHER; note = 2'-O-methoxyethyl modified nucleotide with phosphorothioate linkage
  modified_base 5: mod_base = OTHER; note = Nucleotide with phosphorothioate linkage
  modified_base 6: mod_base = OTHER; note = Nucleotide with phosphorothioate linkage
  modified_base 7: mod_base = OTHER; note = Nucleotide with phosphorothioate linkage
  modified_base 8: mod_base = OTHER; note = Nucleotide with phosphorothioate linkage
  modified_base 9: mod_base = OTHER; note = Nucleotide with phosphorothioate linkage
  modified_base 10: mod_base = OTHER; note = Nucleotide with phosphorothioate linkage
  modified_base 11: mod_base = OTHER; note = Nucleotide with phosphorothioate linkage
  modified_base 12: mod_base = OTHER; note = Nucleotide with phosphorothioate linkage
  modified_base 13: mod_base = OTHER; note = Nucleotide with phosphorothioate linkage
  modified_base 14: mod_base = OTHER; note = Nucleotide with phosphorothioate linkage
  modified_base 15: mod_base = OTHER; note = 2'-O-methoxyethyl modified methylated cytosine with phosphorothioate linkage
  modified_base 16: mod_base = OTHER; note = 2'-O-methoxyethyl modified nucleotide with phosphorothioate linkage
  modified_base 17: mod_base = OTHER; note = 2'-O-methoxyethyl modified nucleotide with phosphorothioate linkage
  modified_base 18: mod_base = OTHER; note = 2'-O-methoxyethyl modified nucleotide with phosphorothioate linkage
  modified_base 19: mod_base = OTHER; note = 2'-O-methoxyethyl modified nucleotide
  misc_feature 1..4: note = RNA
  misc_feature 5..14: note = DNA
  misc_feature 15..19: note = RNA
gtaacactttcacgcaaaa

SEQ ID NO: 184 - DNA, 18 bp, synthetic construct
  source 1..18: mol_type = other DNA
  modified_base 1: mod_base = OTHER; note = 2'-O-methoxyethyl modified methylated cytosine with phosphorothioate linkage
  modified_base 2: mod_base = OTHER; note = 2'-O-methoxyethyl modified nucleotide with phosphorothioate linkage
  modified_base 3: mod_base = OTHER; note = 2'-O-methoxyethyl modified thymine with phosphorothioate linkage
  modified_base 4: mod_base = OTHER; note = 2'-O-methoxyethyl modified thymine with phosphorothioate linkage
  modified_base 5: mod_base = OTHER; note = Nucleotide with phosphorothioate linkage
  modified_base 6: mod_base = OTHER; note = Nucleotide with phosphorothioate linkage
  modified_base 7: mod_base = OTHER; note = Nucleotide with phosphorothioate linkage
  modified_base 8: mod_base = OTHER; note = Nucleotide with phosphorothioate linkage
  modified_base 9: mod_base = OTHER; note = Nucleotide with phosphorothioate linkage
  modified_base 10: mod_base = OTHER; note = Nucleotide with phosphorothioate linkage
  modified_base 11: mod_base = OTHER; note = Nucleotide with phosphorothioate linkage
  modified_base 12: mod_base = OTHER; note = Nucleotide with phosphorothioate linkage
  modified_base 13: mod_base = OTHER; note = Nucleotide with phosphorothioate linkage
  modified_base 14: mod_base = OTHER; note = Nucleotide with phosphorothioate linkage
  modified_base 15: mod_base = OTHER; note = 2'-O-methoxyethyl modified nucleotide with phosphorothioate linkage
  modified_base 16: mod_base = OTHER; note = 2'-O-methoxyethyl modified nucleotide with phosphorothioate linkage
  modified_base 17: mod_base = OTHER; note = 2'-O-methoxyethyl modified thymine with phosphorothioate linkage
  modified_base 18: mod_base = OTHER; note = 2'-O-methoxyethyl modified methylated cytosine
  misc_feature 1..4: note = RNA
  misc_feature 5..14: note = DNA
  misc_feature 15..18: note = RNA
cattctccgaatctggtc

SEQ ID NO: 185 - DNA, 19 bp, synthetic construct
  source 1..19: mol_type = other DNA
  modified_base 1: mod_base = OTHER; note = 2'-O-methoxyethyl modified nucleotide with phosphorothioate linkage
  modified_base 2: mod_base = OTHER; note = 2'-O-methoxyethyl modified nucleotide with phosphorothioate linkage
  modified_base 3: mod_base = OTHER; note = 2'-O-methoxyethyl modified nucleotide with phosphorothioate linkage
  modified_base 4: mod_base = OTHER; note = 2'-O-methoxyethyl modified methylated cytosine with phosphorothioate linkage
  modified_base 5: mod_base = OTHER; note = Nucleotide with phosphorothioate linkage
  modified_base 6: mod_base = OTHER; note = Nucleotide with phosphorothioate linkage
  modified_base 7: mod_base = OTHER; note = Nucleotide with phosphorothioate linkage
  modified_base 8: mod_base = OTHER; note = Nucleotide with phosphorothioate linkage
  modified_base 9: mod_base = OTHER; note = Nucleotide with phosphorothioate linkage
  modified_base 10: mod_base = OTHER; note = Nucleotide with phosphorothioate linkage
  modified_base 11: mod_base = OTHER; note = Nucleotide with phosphorothioate linkage
  modified_base 12: mod_base = OTHER; note = Nucleotide with phosphorothioate linkage
  modified_base 13: mod_base = OTHER; note = Nucleotide with phosphorothioate linkage
  modified_base 14: mod_base = OTHER; note = Nucleotide with phosphorothioate linkage
  modified_base 15: mod_base = OTHER; note = 2'-O-methoxyethyl modified thymine with phosphorothioate linkage
  modified_base 16: mod_base = OTHER; note = 2'-O-methoxyethyl modified methylated cytosine with phosphorothioate linkage
  modified_base 17: mod_base = OTHER; note = 2'-O-methoxyethyl modified thymine with phosphorothioate linkage
  modified_base 18: mod_base = OTHER; note = 2'-O-methoxyethyl modified nucleotide with phosphorothioate linkage
  modified_base 19: mod_base = OTHER; note = 2'-O-methoxyethyl modified thymine
  misc_feature 1..4: note = RNA
  misc_feature 5..14: note = DNA
  misc_feature 15..19: note = RNA
ggacaagtgcatcatctat

SEQ ID NO: 186 - DNA, 20 bp, synthetic construct
  source 1..20: mol_type = other DNA
  modified_base 1: mod_base = OTHER; note = 2'-O-methoxyethyl modified thymine with phosphorothioate linkage
  modified_base 2: mod_base = OTHER; note = 2'-O-methoxyethyl modified methylated cytosine with phosphorothioate linkage
  modified_base 3: mod_base = OTHER; note = 2'-O-methoxyethyl modified methylated cytosine with phosphorothioate linkage
  modified_base 4: mod_base = OTHER; note = 2'-O-methoxyethyl modified nucleotide with phosphorothioate linkage
  modified_base 5: mod_base = OTHER; note = 2'-O-methoxyethyl modified thymine with phosphorothioate linkage
  modified_base 6: mod_base = OTHER; note = Nucleotide with phosphorothioate linkage
  modified_base 7: mod_base = OTHER; note = Nucleotide with phosphorothioate linkage
  modified_base 8: mod_base = OTHER; note = Nucleotide with phosphorothioate linkage
  modified_base 9: mod_base = OTHER; note = Nucleotide with phosphorothioate linkage
  modified_base 10: mod_base = OTHER; note = Nucleotide with phosphorothioate linkage
  modified_base 11: mod_base = OTHER; note = Nucleotide with phosphorothioate linkage
  modified_base 12: mod_base = OTHER; note = Nucleotide with phosphorothioate linkage
  modified_base 13: mod_base = OTHER; note = Nucleotide with phosphorothioate linkage
  modified_base 14: mod_base = OTHER; note = Nucleotide with phosphorothioate linkage
  modified_base 15: mod_base = OTHER; note = Nucleotide with phosphorothioate linkage
  modified_base 16: mod_base = OTHER; note = 2'-O-methoxyethyl modified thymine with phosphorothioate linkage
  modified_base 17: mod_base = OTHER; note = 2'-O-methoxyethyl modified methylated cytosine with phosphorothioate linkage
  modified_base 18: mod_base = OTHER; note = 2'-O-methoxyethyl modified thymine with phosphorothioate linkage
  modified_base 19: mod_base = OTHER; note = 2'-O-methoxyethyl modified nucleotide with phosphorothioate linkage
  modified_base 20: mod_base = OTHER; note = 2'-O-methoxyethyl modified nucleotide
  misc_feature 1..5: note = RNA
  misc_feature 6..15: note = DNA
  misc_feature 16..20: note = RNA
tccatagcgatcatctctag

SEQ ID NO: 187 - DNA, 18 bp, synthetic construct
  source 1..18: mol_type = other DNA
  modified_base 1: mod_base = OTHER; note = 2'-O-methoxyethyl modified nucleotide with phosphorothioate linkage
  modified_base 2: mod_base = OTHER; note = 2'-O-methoxyethyl modified nucleotide with phosphorothioate linkage
  modified_base 3: mod_base = OTHER; note = 2'-O-methoxyethyl modified nucleotide with phosphorothioate linkage
  modified_base 4: mod_base = OTHER; note = 2'-O-methoxyethyl modified methylated cytosine with phosphorothioate linkage
  modified_base 5: mod_base = OTHER; note = Nucleotide with phosphorothioate linkage
  modified_base 6: mod_base = OTHER; note = Nucleotide with phosphorothioate linkage
  modified_base 7: mod_base = OTHER; note = Nucleotide with phosphorothioate linkage
  modified_base 8: mod_base = OTHER; note = Nucleotide with phosphorothioate linkage
  modified_base 9: mod_base = OTHER; note = Nucleotide with phosphorothioate linkage
  modified_base 10: mod_base = OTHER; note = Nucleotide with phosphorothioate linkage
  modified_base 11: mod_base = OTHER; note = Nucleotide with phosphorothioate linkage
  modified_base 12: mod_base = OTHER; note = Nucleotide with phosphorothioate linkage
  modified_base 13: mod_base = OTHER; note = Nucleotide with phosphorothioate linkage
  modified_base 14: mod_base = OTHER; note = Nucleotide with phosphorothioate linkage
  modified_base 15: mod_base = OTHER; note = 2'-O-methoxyethyl modified methylated cytosine with phosphorothioate linkage
  modified_base 16: mod_base = OTHER; note = 2'-O-methoxyethyl modified nucleotide with phosphorothioate linkage
  modified_base 17: mod_base = OTHER; note = 2'-O-methoxyethyl modified nucleotide with phosphorothioate linkage
  modified_base 18: mod_base = OTHER; note = 2'-O-methoxyethyl modified thymine
  misc_feature 1..4: note = RNA
  misc_feature 5..14: note = DNA
  misc_feature 15..18: note = RNA
aagctgtggccattcggt

SEQ ID NO: 188 - DNA, 20 bp, synthetic construct
  source 1..20: mol_type = other DNA
  modified_base 1: mod_base = OTHER; note = 2'-O-methoxyethyl modified methylated cytosine with phosphorothioate linkage
  modified_base 2: mod_base = OTHER; note = 2'-O-methoxyethyl modified methylated cytosine with phosphorothioate linkage
  modified_base 3: mod_base = OTHER; note = 2'-O-methoxyethyl modified thymine with phosphorothioate linkage
  modified_base 4: mod_base = OTHER; note = 2'-O-methoxyethyl modified thymine with phosphorothioate linkage
  modified_base 5: mod_base = OTHER; note = 2'-O-methoxyethyl modified thymine with phosphorothioate linkage
  modified_base 6: mod_base = OTHER; note = Nucleotide with phosphorothioate linkage
  modified_base 7: mod_base = OTHER; note = Nucleotide with phosphorothioate linkage
  modified_base 8: mod_base = OTHER; note = Nucleotide with phosphorothioate linkage
  modified_base 9: mod_base = OTHER; note = Nucleotide with phosphorothioate linkage
  modified_base 10: mod_base = OTHER; note = Nucleotide with phosphorothioate linkage
  modified_base 11: mod_base = OTHER; note = Nucleotide with phosphorothioate linkage
  modified_base 12: mod_base = OTHER; note = Nucleotide with phosphorothioate linkage
  modified_base 13: mod_base = OTHER; note = Nucleotide with phosphorothioate linkage
  modified_base 14: mod_base = OTHER; note = Nucleotide with phosphorothioate linkage
  modified_base 15: mod_base = OTHER; note = Nucleotide with phosphorothioate linkage
  modified_base 16: mod_base = OTHER; note = 2'-O-methoxyethyl modified nucleotide with phosphorothioate linkage
  modified_base 17: mod_base = OTHER; note = 2'-O-methoxyethyl modified methylated cytosine with phosphorothioate linkage
  modified_base 18: mod_base = OTHER; note = 2'-O-methoxyethyl modified methylated cytosine with phosphorothioate linkage
  modified_base 19: mod_base = OTHER; note = 2'-O-methoxyethyl modified nucleotide with phosphorothioate linkage
  modified_base 20: mod_base = OTHER; note = 2'-O-methoxyethyl modified thymine
  misc_feature 1..5: note = RNA
  misc_feature 6..15: note = DNA
  misc_feature 16..20: note = RNA
cctttctgtgtctgggccat

SEQ ID NO: 189 - DNA, 20 bp, synthetic construct
  source 1..20: mol_type = other DNA
  modified_base 1: mod_base = OTHER; note = 2'-O-methoxyethyl modified methylated cytosine with phosphorothioate linkage
  modified_base 2: mod_base = OTHER; note = 2'-O-methoxyethyl modified methylated cytosine with phosphorothioate linkage
  modified_base 3: mod_base = OTHER; note = 2'-O-methoxyethyl modified thymine with phosphorothioate linkage
  modified_base 4: mod_base = OTHER; note = 2'-O-methoxyethyl modified thymine with phosphorothioate linkage
  modified_base 5: mod_base = OTHER; note = 2'-O-methoxyethyl modified methylated cytosine with phosphorothioate linkage
  modified_base 6: mod_base = OTHER; note = Nucleotide with phosphorothioate linkage
  modified_base 7: mod_base = OTHER; note = Nucleotide with phosphorothioate linkage
  modified_base 8: mod_base = OTHER; note = Nucleotide with phosphorothioate linkage
  modified_base 9: mod_base = OTHER; note = Nucleotide with phosphorothioate linkage
  modified_base 10: mod_base = OTHER; note = Nucleotide with phosphorothioate linkage
  modified_base 11: mod_base = OTHER; note = Nucleotide with phosphorothioate linkage
  modified_base 12: mod_base = OTHER; note = Nucleotide with phosphorothioate linkage
  modified_base 13: mod_base = OTHER; note = Nucleotide with phosphorothioate linkage
  modified_base 14: mod_base = OTHER; note = Nucleotide with phosphorothioate linkage
  modified_base 15: mod_base = OTHER; note = Nucleotide with phosphorothioate linkage
  modified_base 16: mod_base = OTHER; note = 2'-O-methoxyethyl modified thymine with phosphorothioate linkage
  modified_base 17: mod_base = OTHER; note = 2'-O-methoxyethyl modified thymine with phosphorothioate linkage
  modified_base 18: mod_base = OTHER; note = 2'-O-methoxyethyl modified nucleotide with phosphorothioate linkage
  modified_base 19: mod_base = OTHER; note = 2'-O-methoxyethyl modified thymine with phosphorothioate linkage
  modified_base 20: mod_base = OTHER; note = 2'-O-methoxyethyl modified nucleotide
  misc_feature 1..5: note = RNA
  misc_feature 6..15: note = DNA
  misc_feature 16..20: note = RNA
ccttcctgttttcatttgta

SEQ ID NO: 190 - DNA, 20 bp, synthetic construct
  source 1..20: mol_type = other DNA
  modified_base 1: mod_base = OTHER; note = 2'-O-methoxyethyl modified nucleotide with phosphorothioate linkage
  modified_base 2: mod_base = OTHER; note = 2'-O-methoxyethyl modified thymine with phosphorothioate linkage
  modified_base 3: mod_base = OTHER; note = 2'-O-methoxyethyl modified methylated cytosine with phosphorothioate linkage
  modified_base 4: mod_base = OTHER; note = 2'-O-methoxyethyl modified nucleotide with phosphorothioate linkage
  modified_base 5: mod_base = OTHER; note = 2'-O-methoxyethyl modified nucleotide with phosphorothioate linkage
  modified_base 6: mod_base = OTHER; note = Nucleotide with phosphorothioate linkage
  modified_base 7: mod_base = OTHER; note = Nucleotide with phosphorothioate linkage
  modified_base 8: mod_base = OTHER; note = Nucleotide with phosphorothioate linkage
  modified_base 9: mod_base = OTHER; note = Nucleotide with phosphorothioate linkage
  modified_base 10: mod_base = OTHER; note = Nucleotide with phosphorothioate linkage
  modified_base 11: mod_base = OTHER; note = Nucleotide with phosphorothioate linkage
  modified_base 12: mod_base = OTHER; note = Nucleotide with phosphorothioate linkage
  modified_base 13: mod_base = OTHER; note = Nucleotide with phosphorothioate linkage
  modified_base 14: mod_base = OTHER; note = Nucleotide with phosphorothioate linkage
  modified_base 15: mod_base = OTHER; note = Nucleotide with phosphorothioate linkage
  modified_base 16: mod_base = OTHER; note = 2'-O-methoxyethyl modified thymine with phosphorothioate linkage
  modified_base 17: mod_base = OTHER; note = 2'-O-methoxyethyl modified thymine with phosphorothioate linkage
  modified_base 18: mod_base = OTHER; note = 2'-O-methoxyethyl modified thymine with phosphorothioate linkage
  modified_base 19: mod_base = OTHER; note = 2'-O-methoxyethyl modified methylated cytosine with phosphorothioate linkage
  modified_base 20: mod_base = OTHER; note = 2'-O-methoxyethyl modified thymine
  misc_feature 1..5: note = RNA
  misc_feature 6..15: note = DNA
  misc_feature 16..20: note = RNA
atcagttgccgtgtctttct

SEQ ID NO: 191 - DNA, 20 bp, synthetic construct
  source 1..20: mol_type = other DNA
  modified_base 1: mod_base = OTHER; note = 2'-O-methoxyethyl modified thymine with phosphorothioate linkage
  modified_base 2: mod_base = OTHER; note = 2'-O-methoxyethyl modified nucleotide with phosphorothioate linkage
  modified_base 3: mod_base = OTHER; note = 2'-O-methoxyethyl modified nucleotide with phosphorothioate linkage
  modified_base 4: mod_base = OTHER; note = 2'-O-methoxyethyl modified nucleotide with phosphorothioate linkage
  modified_base 5: mod_base = OTHER; note = 2'-O-methoxyethyl modified methylated cytosine with phosphorothioate linkage
  modified_base 6: mod_base = OTHER; note = Nucleotide with phosphorothioate linkage
  modified_base 7: mod_base = OTHER; note = Nucleotide with phosphorothioate linkage
  modified_base 8: mod_base = OTHER; note = Nucleotide with phosphorothioate linkage
  modified_base 9: mod_base = OTHER; note = Nucleotide with phosphorothioate linkage
  modified_base 10: mod_base = OTHER; note = Nucleotide with phosphorothioate linkage
  modified_base 11: mod_base = OTHER; note = Nucleotide with phosphorothioate linkage
  modified_base 12: mod_base = OTHER; note = Nucleotide with phosphorothioate linkage
  modified_base 13: mod_base = OTHER; note = Nucleotide with phosphorothioate linkage
  modified_base 14: mod_base = OTHER; note = Nucleotide with phosphorothioate linkage
  modified_base 15: mod_base = OTHER; note = Nucleotide with phosphorothioate linkage
  modified_base 16: mod_base = OTHER; note = 2'-O-methoxyethyl modified methylated cytosine with phosphorothioate linkage
  modified_base 17: mod_base = OTHER; note = 2'-O-methoxyethyl modified methylated cytosine with phosphorothioate linkage
  modified_base 18: mod_base = OTHER; note = 2'-O-methoxyethyl modified thymine with phosphorothioate linkage
  modified_base 19: mod_base = OTHER; note = 2'-O-methoxyethyl modified thymine with phosphorothioate linkage
  modified_base 20: mod_base = OTHER; note = 2'-O-methoxyethyl modified nucleotide
  misc_feature 1..5: note = RNA
  misc_feature 6..15: note = DNA
  misc_feature 16..20: note = RNA
tgagctatcacctatccttg

SEQ ID NO: 192 - DNA, 20 bp, synthetic construct
  source 1..20: mol_type = other DNA
  modified_base 1: mod_base = OTHER; note = 2'-O-methoxyethyl modified nucleotide with phosphorothioate linkage
  modified_base 2: mod_base = OTHER; note = 2'-O-methoxyethyl modified methylated cytosine with phosphorothioate linkage
  modified_base 3: mod_base = OTHER; note = 2'-O-methoxyethyl modified nucleotide with phosphorothioate linkage
  modified_base 4: mod_base = OTHER; note = 2'-O-methoxyethyl modified thymine with phosphorothioate linkage
  modified_base 5: mod_base = OTHER; note = 2'-O-methoxyethyl modified thymine with phosphorothioate linkage
  modified_base 6: mod_base = OTHER; note = Nucleotide with phosphorothioate linkage
  modified_base 7: mod_base = OTHER; note = Nucleotide with phosphorothioate linkage
  modified_base 8: mod_base = OTHER; note = Nucleotide with phosphorothioate linkage
  modified_base 9: mod_base = OTHER; note = Nucleotide with phosphorothioate linkage
  modified_base 10: mod_base = OTHER; note = Nucleotide with phosphorothioate linkage
  modified_base 11: mod_base = OTHER; note = Nucleotide with phosphorothioate linkage
  modified_base 12: mod_base = OTHER; note = Nucleotide with phosphorothioate linkage
  modified_base 13: mod_base = OTHER; note = Nucleotide with phosphorothioate linkage
  modified_base 14: mod_base = OTHER; note = Nucleotide with phosphorothioate linkage
  modified_base 15: mod_base = OTHER; note = Nucleotide with phosphorothioate linkage
  modified_base 16: mod_base = OTHER; note = 2'-O-methoxyethyl modified methylated cytosine with phosphorothioate linkage
  modified_base 17: mod_base = OTHER; note = 2'-O-methoxyethyl modified nucleotide with phosphorothioate linkage
  modified_base 18: mod_base = OTHER; note = 2'-O-methoxyethyl modified nucleotide with phosphorothioate linkage
  modified_base 19: mod_base = OTHER; note = 2'-O-methoxyethyl modified thymine with phosphorothioate linkage
  modified_base 20: mod_base = OTHER; note = 2'-O-methoxyethyl modified nucleotide
  misc_feature 1..5: note = RNA
  misc_feature 6..15: note = DNA
  misc_feature 16..20: note = RNA
acattcggctagcttcaatg

SEQ ID NO: 193 - DNA, 19 bp, synthetic construct
  source 1..19: mol_type = other DNA
  modified_base 1: mod_base = OTHER; note = 2'-O-methoxyethyl modified thymine with phosphorothioate linkage
  modified_base 2: mod_base = OTHER; note = 2'-O-methoxyethyl modified thymine with phosphorothioate linkage
  modified_base 3: mod_base = OTHER; note = 2'-O-methoxyethyl modified methylated cytosine with phosphorothioate linkage
  modified_base 4: mod_base = OTHER; note = 2'-O-methoxyethyl modified nucleotide with phosphorothioate linkage
  modified_base 5: mod_base = OTHER; note = Nucleotide with phosphorothioate linkage
  modified_base 6: mod_base = OTHER; note = Nucleotide with phosphorothioate linkage
  modified_base 7: mod_base = OTHER; note = Nucleotide with phosphorothioate linkage
  modified_base 8: mod_base = OTHER; note = Nucleotide with phosphorothioate linkage
  modified_base 9: mod_base = OTHER; note = Nucleotide with phosphorothioate linkage
  modified_base 10: mod_base = OTHER; note = Nucleotide with phosphorothioate linkage
  modified_base 11: mod_base = OTHER; note = Nucleotide with phosphorothioate linkage
  modified_base 12: mod_base = OTHER; note = Nucleotide with phosphorothioate linkage
  modified_base 13: mod_base = OTHER; note = Nucleotide with phosphorothioate linkage
  modified_base 14: mod_base = OTHER; note = Nucleotide with phosphorothioate linkage
  modified_base 15: mod_base = OTHER; note = 2'-O-methoxyethyl modified nucleotide with phosphorothioate linkage
  modified_base 16: mod_base = OTHER; note = 2'-O-methoxyethyl modified thymine with phosphorothioate linkage
  modified_base 17: mod_base = OTHER; note = 2'-O-methoxyethyl modified nucleotide with phosphorothioate linkage
  modified_base 18: mod_base = OTHER; note = 2'-O-methoxyethyl modified thymine with phosphorothioate linkage
  modified_base 19: mod_base = OTHER; note = 2'-O-methoxyethyl modified methylated cytosine
  misc_feature 1..4: note = RNA
  misc_feature 5..14: note = DNA
  misc_feature 15..19: note = RNA
ttcggctagcttcaatgtc

SEQ ID NO: 194 - DNA, 18 bp, synthetic construct
  source 1..18: mol_type = other DNA
  modified_base 1: mod_base = OTHER; note = 2'-O-methoxyethyl modified thymine with phosphorothioate linkage
  modified_base 2: mod_base = OTHER; note = 2'-O-methoxyethyl modified thymine with phosphorothioate linkage
  modified_base 3: mod_base = OTHER; note = 2'-O-methoxyethyl modified methylated cytosine with phosphorothioate linkage
  modified_base 4: mod_base = OTHER; note = 2'-O-methoxyethyl modified nucleotide with phosphorothioate linkage
  modified_base 5: mod_base = OTHER; note = Nucleotide with phosphorothioate linkage
  modified_base 6: mod_base = OTHER; note = Nucleotide with phosphorothioate linkage
  modified_base 7: mod_base = OTHER; note = Nucleotide with phosphorothioate linkage
  modified_base 8: mod_base = OTHER; note = Nucleotide with phosphorothioate linkage
  modified_base 9: mod_base = OTHER; note = Nucleotide with phosphorothioate linkage
  modified_base 10: mod_base = OTHER; note = Nucleotide with phosphorothioate linkage
  modified_base 11: mod_base = OTHER; note = Nucleotide with phosphorothioate linkage
  modified_base 12: mod_base = OTHER; note = Nucleotide with phosphorothioate linkage
  modified_base 13: mod_base = OTHER; note = Nucleotide with phosphorothioate linkage
  modified_base 14: mod_base = OTHER; note = Nucleotide with phosphorothioate linkage
  modified_base 15: mod_base = OTHER; note = 2'-O-methoxyethyl modified nucleotide with phosphorothioate linkage
  modified_base 16: mod_base = OTHER; note = 2'-O-methoxyethyl modified nucleotide with phosphorothioate linkage
  modified_base 17: mod_base = OTHER; note = 2'-O-methoxyethyl modified nucleotide with phosphorothioate linkage
  modified_base 18: mod_base = OTHER; note = 2'-O-methoxyethyl modified thymine
  misc_feature 1..4: note = RNA
  misc_feature 5..14: note = DNA
  misc_feature 15..18: note = RNA
ttcggctagcttcaaggt

SEQ ID NO: 195 - DNA, 19 bp, synthetic construct
  source 1..19: mol_type = other DNA
  modified_base 1: mod_base = OTHER; note = 2'-O-methoxyethyl modified methylated cytosine with phosphorothioate linkage
  modified_base 2: mod_base = OTHER; note = 2'-O-methoxyethyl modified thymine with phosphorothioate linkage
  modified_base 3: mod_base = OTHER; note = 2'-O-methoxyethyl modified thymine with phosphorothioate linkage
  modified_base 4: mod_base = OTHER; note = 2'-O-methoxyethyl modified nucleotide with phosphorothioate linkage
  modified_base 5: mod_base = OTHER; note = Nucleotide with phosphorothioate linkage
  modified_base 6: mod_base = OTHER; note = Nucleotide with phosphorothioate linkage
  modified_base 7: mod_base = OTHER; note = Nucleotide with phosphorothioate linkage
  modified_base 8: mod_base = OTHER; note = Nucleotide with phosphorothioate linkage
  modified_base 9: mod_base = OTHER; note = Nucleotide with phosphorothioate linkage
  modified_base 10: mod_base = OTHER; note = Nucleotide with phosphorothioate linkage
  modified_base 11: mod_base = OTHER; note = Nucleotide with phosphorothioate linkage
  modified_base 12: mod_base = OTHER; note = Nucleotide with phosphorothioate linkage
  modified_base 13: mod_base = OTHER; note = Nucleotide with phosphorothioate linkage
  modified_base 14: mod_base = OTHER; note = Nucleotide with phosphorothioate linkage
  modified_base 15: mod_base = OTHER; note = 2'-O-methoxyethyl modified nucleotide with phosphorothioate linkage
  modified_base 16: mod_base = OTHER; note = 2'-O-methoxyethyl modified methylated cytosine with phosphorothioate linkage
  modified_base 17: mod_base = OTHER; note = 2'-O-methoxyethyl modified thymine with phosphorothioate linkage
  modified_base 18: mod_base = OTHER; note = 2'-O-methoxyethyl modified thymine with phosphorothioate linkage
  modified_base 19: mod_base = OTHER; note = 2'-O-methoxyethyl modified methylated cytosine
  misc_feature 1..4: note = RNA
  misc_feature 5..14: note = DNA
  misc_feature 15..19: note = RNA
cttacattcggctagcttc

SEQ ID NO: 196 - DNA, 18 bp, synthetic construct
  source 1..18: mol_type = other DNA
  modified_base 1: mod_base = OTHER; note = 2'-O-methoxyethyl modified methylated cytosine with phosphorothioate linkage
  modified_base 2: mod_base = OTHER; note = 2'-O-methoxyethyl modified thymine with phosphorothioate linkage
  modified_base 3: mod_base = OTHER; note = 2'-O-methoxyethyl modified thymine with phosphorothioate linkage
  modified_base 4: mod_base = OTHER; note = 2'-O-methoxyethyl modified nucleotide with phosphorothioate linkage
  modified_base 5: mod_base = OTHER; note = Nucleotide with phosphorothioate linkage
  modified_base 6: mod_base = OTHER; note = Nucleotide with phosphorothioate linkage
  modified_base 7: mod_base = OTHER; note = Nucleotide with phosphorothioate linkage
  modified_base 8: mod_base = OTHER; note = Nucleotide with phosphorothioate linkage
  modified_base 9: mod_base = OTHER; note = Nucleotide with phosphorothioate linkage
  modified_base 10: mod_base = OTHER; note = Nucleotide with phosphorothioate linkage
  modified_base 11: mod_base = OTHER; note = Nucleotide with phosphorothioate linkage
  modified_base 12: mod_base = OTHER; note = Nucleotide with phosphorothioate linkage
  modified_base 13: mod_base = OTHER; note = Nucleotide with phosphorothioate linkage
  modified_base 14: mod_base = OTHER; note = Nucleotide with phosphorothioate linkage
  modified_base 15: mod_base = OTHER; note = 2'-O-methoxyethyl modified nucleotide with phosphorothioate linkage
  modified_base 16: mod_base = OTHER; note = 2'-O-methoxyethyl modified methylated cytosine with phosphorothioate linkage
  modified_base 17: mod_base = OTHER; note = 2'-O-methoxyethyl modified thymine with phosphorothioate linkage
  modified_base 18: mod_base = OTHER; note = 2'-O-methoxyethyl modified thymine
  misc_feature 1..4: note = RNA
  misc_feature 5..14: note = DNA
  misc_feature 15..18: note = RNA
cttacattcggctagctt

SEQ ID NO: 197 - DNA, 19 bp, synthetic construct
  source 1..19: mol_type = other DNA
  modified_base 1: mod_base = OTHER; note = 2'-O-methoxyethyl modified nucleotide with phosphorothioate linkage
  modified_base 2: mod_base = OTHER; note = 2'-O-methoxyethyl modified thymine with phosphorothioate linkage
  modified_base 3: mod_base = OTHER; note = 2'-O-methoxyethyl modified thymine with phosphorothioate linkage
  modified_base 4: mod_base = OTHER; note = 2'-O-methoxyethyl modified methylated cytosine with phosphorothioate linkage
  modified_base 5: mod_base = OTHER; note = Nucleotide with phosphorothioate linkage
  modified_base 6: mod_base = OTHER; note = Nucleotide with phosphorothioate linkage
  modified_base 7: mod_base = OTHER; note = Nucleotide with phosphorothioate linkage
  modified_base 8: mod_base = OTHER; note = Nucleotide with phosphorothioate linkage
  modified_base 9: mod_base = OTHER; note = Nucleotide with phosphorothioate linkage
  modified_base 10: mod_base = OTHER; note = Nucleotide with phosphorothioate linkage
  modified_base 11: mod_base = OTHER; note = Nucleotide with phosphorothioate linkage
  modified_base 12: mod_base = OTHER; note = Nucleotide with phosphorothioate linkage
  modified_base 13: mod_base = OTHER; note = Nucleotide with phosphorothioate linkage
  modified_base 14: mod_base = OTHER; note = Nucleotide with phosphorothioate linkage
  modified_base 15: mod_base = OTHER; note = 2'-O-methoxyethyl modified nucleotide with phosphorothioate linkage
  modified_base 16: mod_base = OTHER; note = 2'-O-methoxyethyl modified nucleotide with phosphorothioate linkage
  modified_base 17: mod_base = OTHER; note = 2'-O-methoxyethyl modified thymine with phosphorothioate linkage
  modified_base 18: mod_base = OTHER; note = 2'-O-methoxyethyl modified nucleotide with phosphorothioate linkage
  modified_base 19: mod_base = OTHER; note = 2'-O-methoxyethyl modified thymine
  misc_feature 1..4: note = RNA
  misc_feature 5..14: note = DNA
  misc_feature 15..19: note = RNA
attcggctagcttcaatgt

SEQ ID NO: 198 - DNA, 19 bp, synthetic construct
  source 1..19: mol_type = other DNA
  modified_base 1: mod_base = OTHER; note = 2'-O-methoxyethyl modified thymine with phosphorothioate linkage
  modified_base 2: mod_base = OTHER; note = 2'-O-methoxyethyl modified nucleotide with phosphorothioate linkage
  modified_base 3: mod_base = OTHER; note = 2'-O-methoxyethyl modified methylated cytosine with phosphorothioate linkage
  modified_base 4: mod_base = OTHER; note = 2'-O-methoxyethyl modified methylated cytosine with phosphorothioate linkage
  modified_base 5: mod_base = OTHER; note = Nucleotide with phosphorothioate linkage
  modified_base 6: mod_base = OTHER; note = Nucleotide with phosphorothioate linkage
  modified_base 7: mod_base = OTHER; note = Nucleotide with phosphorothioate linkage
  modified_base 8: mod_base = OTHER; note = Nucleotide with phosphorothioate linkage
  modified_base 9: mod_base = OTHER; note = Nucleotide with phosphorothioate linkage
  modified_base 10: mod_base = OTHER; note = Nucleotide with phosphorothioate linkage
  modified_base 11: mod_base = OTHER; note = Nucleotide with phosphorothioate linkage
  modified_base 12: mod_base = OTHER; note = Nucleotide with phosphorothioate linkage
  modified_base 13: mod_base = OTHER; note = Nucleotide with phosphorothioate linkage
  modified_base 14: mod_base = OTHER; note = Nucleotide with phosphorothioate linkage
  modified_base 15: mod_base = OTHER; note = 2'-O-methoxyethyl modified nucleotide with phosphorothioate linkage
  modified_base 16: mod_base = OTHER; note = 2'-O-methoxyethyl modified nucleotide with phosphorothioate linkage
  modified_base 17: mod_base = OTHER; note = 2'-O-methoxyethyl modified nucleotide with phosphorothioate linkage
  modified_base 18: mod_base = OTHER; note = 2'-O-methoxyethyl modified methylated cytosine with phosphorothioate linkage
  modified_base 19: mod_base = OTHER; note = 2'-O-methoxyethyl modified thymine
  misc_feature 1..4: note = RNA
  misc_feature 5..14: note = DNA
  misc_feature 15..19: note = RNA
taccatatttcgccaaact

SEQ ID NO: 199 - DNA, 20 bp, synthetic construct
  source 1..20: mol_type = other DNA
  modified_base 1: mod_base = OTHER; note = 2'-O-methoxyethyl modified nucleotide with phosphorothioate linkage
  modified_base 2: mod_base = OTHER; note = 2'-O-methoxyethyl modified methylated cytosine with phosphorothioate linkage
  modified_base 3: mod_base = OTHER; note = 2'-O-methoxyethyl modified methylated cytosine with phosphorothioate linkage
  modified_base 4: mod_base = OTHER; note = 2'-O-methoxyethyl modified thymine with phosphorothioate linkage
  modified_base 5: mod_base = OTHER; note = 2'-O-methoxyethyl modified thymine with phosphorothioate linkage
  modified_base 6: mod_base = OTHER; note = Nucleotide with phosphorothioate linkage
  modified_base 7: mod_base = OTHER; note = Nucleotide with phosphorothioate linkage
  modified_base 8: mod_base = OTHER; note = Nucleotide with phosphorothioate linkage
  modified_base 9: mod_base = OTHER; note = Nucleotide with phosphorothioate linkage
  modified_base 10: mod_base = OTHER; note = Nucleotide with phosphorothioate linkage
  modified_base 11: mod_base = OTHER; note = Nucleotide with phosphorothioate linkage
  modified_base 12: mod_base = OTHER; note = Nucleotide with phosphorothioate linkage
  modified_base 13: mod_base = OTHER; note = Nucleotide with phosphorothioate linkage
  modified_base 14: mod_base = OTHER; note = Nucleotide with phosphorothioate linkage
  modified_base 15: mod_base = OTHER; note = Nucleotide with phosphorothioate linkage
  modified_base 16: mod_base = OTHER; note = 2'-O-methoxyethyl modified nucleotide with phosphorothioate linkage
  modified_base 17: mod_base = OTHER; note = 2'-O-methoxyethyl modified nucleotide with phosphorothioate linkage
  modified_base 18: mod_base = OTHER; note = 2'-O-methoxyethyl modified methylated cytosine with phosphorothioate linkage
  modified_base 19: mod_base = OTHER; note = 2'-O-methoxyethyl modified methylated cytosine with phosphorothioate linkage
  modified_base 20: mod_base = OTHER; note = 2'-O-methoxyethyl modified nucleotide
  misc_feature 1..5: note = RNA
  misc_feature 6..15: note = DNA
  misc_feature 16..20: note = RNA
acctttctgtgtctgggcca

SEQ ID NO: 200 - DNA, 19 bp, synthetic construct
  source 1..19: mol_type = other DNA
  modified_base 1: mod_base = OTHER; note = 2'-O-methoxyethyl modified thymine with phosphorothioate linkage
  modified_base 2: mod_base = OTHER; note = 2'-O-methoxyethyl modified methylated cytosine with phosphorothioate linkage
  modified_base 3: mod_base = OTHER; note = 2'-O-methoxyethyl modified nucleotide with phosphorothioate linkage
  modified_base 4: mod_base = OTHER; note = 2'-O-methoxyethyl modified methylated cytosine with phosphorothioate linkage
  modified_base 5: mod_base = OTHER; note = Nucleotide with phosphorothioate linkage
  modified_base 6: mod_base = OTHER; note = Nucleotide with phosphorothioate linkage
  modified_base 7: mod_base = OTHER; note = Nucleotide with phosphorothioate linkage
  modified_base 8: mod_base = OTHER; note = Nucleotide with phosphorothioate linkage
  modified_base 9: mod_base = OTHER; note = Nucleotide with phosphorothioate linkage
  modified_base 10: mod_base = OTHER; note = Nucleotide with phosphorothioate linkage
  modified_base 11: mod_base = OTHER; note = Nucleotide with phosphorothioate linkage
  modified_base 12: mod_base = OTHER; note = Nucleotide with phosphorothioate linkage
  modified_base 13: mod_base = OTHER; note = Nucleotide with phosphorothioate linkage
  modified_base 14: mod_base = OTHER; note = Nucleotide with phosphorothioate linkage
  modified_base 15: mod_base = OTHER; note = 2'-O-methoxyethyl modified nucleotide with phosphorothioate linkage
  modified_base 16: mod_base = OTHER; note = 2'-O-methoxyethyl modified nucleotide with phosphorothioate linkage
  modified_base 17: mod_base = OTHER; note = 2'-O-methoxyethyl modified nucleotide with phosphorothioate linkage
  modified_base 18: mod_base = OTHER; note = 2'-O-methoxyethyl modified thymine with phosphorothioate linkage
  modified_base 19: mod_base = OTHER; note = 2'-O-methoxyethyl modified nucleotide
  misc_feature 1..4: note = RNA
  misc_feature 5..14: note = DNA
  misc_feature 15..19: note = RNA
tcacattccacgttaggtg

SEQ ID NO: 201 - DNA, 20 bp, synthetic construct
  source 1..20: mol_type = other DNA
  modified_base 1: mod_base = OTHER; note = 2'-O-methoxyethyl modified methylated cytosine with phosphorothioate linkage
  modified_base 2: mod_base = OTHER; note = 2'-O-methoxyethyl modified nucleotide with phosphorothioate linkage
  modified_base 3: mod_base = OTHER; note = 2'-O-methoxyethyl modified thymine with phosphorothioate linkage
  modified_base 4: mod_base = OTHER; note = 2'-O-methoxyethyl modified nucleotide with phosphorothioate linkage
  modified_base 5: mod_base = OTHER; note = 2'-O-methoxyethyl modified thymine with phosphorothioate linkage
  modified_base 6: mod_base = OTHER; note = Nucleotide with phosphorothioate linkage
  modified_base 7: mod_base = OTHER; note = Nucleotide with phosphorothioate linkage
  modified_base 8: mod_base = OTHER; note = Nucleotide with phosphorothioate linkage
  modified_base 9: mod_base = OTHER; note = Nucleotide with phosphorothioate linkage
  modified_base 10: mod_base = OTHER; note = Nucleotide with phosphorothioate linkage
  modified_base 11: mod_base = OTHER; note = Nucleotide with phosphorothioate linkage
  modified_base 12: mod_base = OTHER; note = Nucleotide with phosphorothioate linkage
  modified_base 13: mod_base = OTHER; note = Nucleotide with phosphorothioate linkage
  modified_base 14: mod_base = OTHER; note = Nucleotide with phosphorothioate linkage
  modified_base 15: mod_base = OTHER; note = Nucleotide with phosphorothioate linkage
  modified_base 16: mod_base = OTHER; note = 2'-O-methoxyethyl modified methylated cytosine with phosphorothioate linkage
  modified_base 17: mod_base = OTHER; note = 2'-O-methoxyethyl modified thymine with phosphorothioate linkage
  modified_base 18: mod_base = OTHER; note = 2'-O-methoxyethyl modified nucleotide with phosphorothioate linkage
  modified_base 19: mod_base = OTHER; note = 2'-O-methoxyethyl modified nucleotide with phosphorothioate linkage
  modified_base 20: mod_base = OTHER; note = 2'-O-methoxyethyl modified nucleotide
  misc_feature 1..5: note = RNA
  misc_feature 6..15: note = DNA
  misc_feature 16..20: note = RNA
cgtgtctttctgtgtctggg

SEQ ID NO: 202 - DNA, 17 bp, synthetic construct
  source 1..17: mol_type = other DNA
  modified_base 1: mod_base = OTHER; note = 2'-O-methoxyethyl modified methylated cytosine with phosphorothioate linkage
  modified_base 2: mod_base = OTHER; note = 2'-O-methoxyethyl modified thymine with phosphorothioate linkage
  modified_base 3: mod_base = OTHER; note = 2'-O-methoxyethyl modified thymine with phosphorothioate linkage
  modified_base 4: mod_base = OTHER; note = Nucleotide with phosphorothioate linkage
  modified_base 5: mod_base = OTHER; note = Nucleotide with phosphorothioate linkage
  modified_base 6: mod_base = OTHER; note = Nucleotide with phosphorothioate linkage
  modified_base 7: mod_base = OTHER; note = Nucleotide with phosphorothioate linkage
  modified_base 8: mod_base = OTHER; note = Nucleotide with phosphorothioate linkage
  modified_base 9: mod_base = OTHER; note = Nucleotide with phosphorothioate linkage
  modified_base 10: mod_base = OTHER; note = Nucleotide with phosphorothioate linkage
  modified_base 11: mod_base = OTHER; note = Nucleotide with phosphorothioate linkage
  modified_base 12: mod_base = OTHER; note = Nucleotide with phosphorothioate linkage
  modified_base 13: mod_base = OTHER; note = Nucleotide with phosphorothioate linkage
  modified_base 14: mod_base = OTHER; note = 2'-O-methoxyethyl modified nucleotide with phosphorothioate linkage
  modified_base 15: mod_base = OTHER; note = 2'-O-methoxyethyl modified nucleotide with phosphorothioate linkage
  modified_base 16: mod_base = OTHER; note = 2'-O-methoxyethyl modified methylated cytosine with phosphorothioate linkage
  modified_base 17: mod_base = OTHER; note = 2'-O-methoxyethyl modified thymine
  misc_feature 1..3: note = RNA
  misc_feature 4..13: note = DNA
  misc_feature 14..17: note = RNA
cttacattcggctagct

SEQ ID NO: 203 - DNA, 20 bp, synthetic construct
  source 1..20: mol_type = other DNA
  modified_base 1: mod_base = OTHER; note = 2'-O-methoxyethyl modified thymine with phosphorothioate linkage
  modified_base 2: mod_base = OTHER; note = 2'-O-methoxyethyl modified nucleotide with phosphorothioate linkage
  modified_base 3: mod_base = OTHER; note = 2'-O-methoxyethyl modified thymine with phosphorothioate linkage
  modified_base 4: mod_base = OTHER; note = 2'-O-methoxyethyl modified methylated cytosine with phosphorothioate linkage
  modified_base 5: mod_base = OTHER; note = 2'-O-methoxyethyl modified thymine with phosphorothioate linkage
  modified_base 6: mod_base = OTHER; note = Nucleotide with phosphorothioate linkage
  modified_base 7: mod_base = OTHER; note = Nucleotide with phosphorothioate linkage
  modified_base 8: mod_base = OTHER; note = Nucleotide with phosphorothioate linkage
  modified_base 9: mod_base = OTHER; note = Nucleotide with phosphorothioate linkage
  modified_base 10: mod_base = OTHER; note = Nucleotide with phosphorothioate linkage
  modified_base 11: mod_base = OTHER; note = Nucleotide with phosphorothioate linkage
  modified_base 12: mod_base = OTHER; note = Nucleotide with phosphorothioate linkage
  modified_base 13: mod_base = OTHER; note = Nucleotide with phosphorothioate linkage
  modified_base 14: mod_base = OTHER; note = Nucleotide with phosphorothioate linkage
  modified_base 15: mod_base = OTHER; note = Nucleotide with phosphorothioate linkage
  modified_base 16: mod_base = OTHER; note = 2'-O-methoxyethyl modified nucleotide with phosphorothioate linkage
  modified_base 17: mod_base = OTHER; note = 2'-O-methoxyethyl modified nucleotide with phosphorothioate linkage
  modified_base 18: mod_base = OTHER; note = 2'-O-methoxyethyl modified nucleotide with phosphorothioate linkage
  modified_base 19: mod_base = OTHER; note = 2'-O-methoxyethyl modified methylated cytosine with phosphorothioate linkage
  modified_base 20: mod_base = OTHER; note = 2'-O-methoxyethyl modified methylated cytosine
  misc_feature 1..5: note = RNA
  misc_feature 6..15: note = DNA
  misc_feature 16..20: note = RNA
tgtctttctgtgtctgggcc

SEQ ID NO: 204 - DNA, 20 bp, synthetic construct
  source 1..20: mol_type = other DNA
  modified_base 1: mod_base = OTHER; note = 2'-O-methoxyethyl modified methylated cytosine with phosphorothioate linkage
  modified_base 2: mod_base = OTHER; note = 2'-O-methoxyethyl modified thymine with phosphorothioate linkage
  modified_base 3: mod_base = OTHER; note = 2'-O-methoxyethyl modified thymine with phosphorothioate linkage
  modified_base 4: mod_base = OTHER; note = 2'-O-methoxyethyl modified nucleotide with phosphorothioate linkage
  modified_base 5: mod_base = OTHER; note = 2'-O-methoxyethyl modified methylated cytosine with phosphorothioate linkage
  modified_base 6: mod_base = OTHER; note = Nucleotide with phosphorothioate linkage
  modified_base 7: mod_base = OTHER; note = Nucleotide with phosphorothioate linkage
  modified_base 8: mod_base = OTHER; note = Nucleotide with phosphorothioate linkage
  modified_base 9: mod_base = OTHER; note = Nucleotide with phosphorothioate linkage
  modified_base 10: mod_base = OTHER; note = Nucleotide with phosphorothioate linkage
  modified_base 11: mod_base = OTHER; note = Nucleotide with phosphorothioate linkage
  modified_base 12: mod_base = OTHER; note = Nucleotide with phosphorothioate linkage
  modified_base 13: mod_base = OTHER; note = Nucleotide with phosphorothioate linkage
  modified_base 14: mod_base = OTHER; note = Nucleotide with phosphorothioate linkage
  modified_base 15: mod_base = OTHER; note = Nucleotide with phosphorothioate linkage
  modified_base 16: mod_base = OTHER; note = 2'-O-methoxyethyl modified methylated cytosine with phosphorothioate linkage
  modified_base 17: mod_base = OTHER; note = 2'-O-methoxyethyl modified nucleotide with phosphorothioate linkage
  modified_base 18: mod_base = OTHER; note = 2'-O-methoxyethyl modified thymine with phosphorothioate linkage
  modified_base 19: mod_base = OTHER; note = 2'-O-methoxyethyl modified nucleotide with phosphorothioate linkage
  modified_base 20: mod_base = OTHER; note = 2'-O-methoxyethyl modified thymine
  misc_feature 1..5: note = RNA
  misc_feature 6..15: note = DNA
  misc_feature 16..20: note = RNA
cttacccggcttccacatat

SEQ ID NO: 205 - DNA, 19 bp, synthetic construct
  source 1..19: mol_type = other DNA
  modified_base 1: mod_base = OTHER; note = 2'-O-methoxyethyl modified thymine with phosphorothioate linkage
  modified_base 2: mod_base = OTHER; note = 2'-O-methoxyethyl modified thymine with phosphorothioate linkage
  modified_base 3: mod_base = OTHER; note = 2'-O-methoxyethyl modified nucleotide with phosphorothioate linkage
  modified_base 4: mod_base = OTHER; note = 2'-O-methoxyethyl modified methylated cytosine with phosphorothioate linkage
  modified_base 5: mod_base = OTHER; note = Nucleotide with phosphorothioate linkage
  modified_base 6: mod_base = OTHER; note = Nucleotide with phosphorothioate linkage
  modified_base 7: mod_base = OTHER; note = Nucleotide with phosphorothioate linkage
  modified_base 8: mod_base = OTHER; note = Nucleotide with phosphorothioate linkage
  modified_base 9: mod_base = OTHER; note = Nucleotide with phosphorothioate linkage
  modified_base 10: mod_base = OTHER; note = Nucleotide with phosphorothioate linkage
  modified_base 11: mod_base = OTHER; note = Nucleotide with phosphorothioate linkage
  modified_base 12: mod_base = OTHER; note = Nucleotide with phosphorothioate linkage
  modified_base 13: mod_base = OTHER; note = Nucleotide with phosphorothioate linkage
  modified_base 14: mod_base = OTHER; note = Nucleotide with phosphorothioate linkage
  modified_base 15: mod_base = OTHER; note = 2'-O-methoxyethyl modified methylated cytosine with phosphorothioate linkage
  modified_base 16: mod_base = OTHER; note = 2'-O-methoxyethyl modified thymine with phosphorothioate linkage
  modified_base 17: mod_base = OTHER; note = 2'-O-methoxyethyl modified thymine with phosphorothioate linkage
  modified_base 18: mod_base = OTHER; note = 2'-O-methoxyethyl modified methylated cytosine with phosphorothioate linkage
  modified_base 19: mod_base = OTHER; note = 2'-O-methoxyethyl modified nucleotide
  misc_feature 1..4: note = RNA
  misc_feature 5..14: note = DNA
  misc_feature 15..19: note = RNA
ttacattcggctagcttca

SEQ ID NO: 206 - DNA, 19 bp, synthetic construct
  source 1..19: mol_type = other DNA
  modified_base 1: mod_base = OTHER; note = 2'-O-methoxyethyl modified nucleotide with phosphorothioate linkage
  modified_base 2: mod_base = OTHER; note = 2'-O-methoxyethyl modified methylated cytosine with phosphorothioate linkage
  modified_base 3: mod_base = OTHER; note = 2'-O-methoxyethyl modified nucleotide with phosphorothioate linkage
  modified_base 4: mod_base = OTHER; note = 2'-O-methoxyethyl modified thymine with phosphorothioate linkage
  modified_base 5: mod_base = OTHER; note = Nucleotide with phosphorothioate linkage
  modified_base 6: mod_base = OTHER; note = Nucleotide with phosphorothioate linkage
  modified_base 7: mod_base = OTHER; note = Nucleotide with phosphorothioate linkage
  modified_base 8: mod_base = OTHER; note = Nucleotide with phosphorothioate linkage
  modified_base 9: mod_base = OTHER; note = Nucleotide with phosphorothioate linkage
  modified_base 10: mod_base = OTHER; note = Nucleotide with phosphorothioate linkage
  modified_base 11: mod_base = OTHER; note = Nucleotide with phosphorothioate linkage
  modified_base 12: mod_base = OTHER; note = Nucleotide with phosphorothioate linkage
  modified_base 13: mod_base = OTHER; note = Nucleotide with phosphorothioate linkage
  modified_base 14: mod_base = OTHER; note = Nucleotide with phosphorothioate linkage
  modified_base 15: mod_base = OTHER; note = 2'-O-methoxyethyl modified thymine with phosphorothioate linkage
  modified_base 16: mod_base = OTHER; note = 2'-O-methoxyethyl modified methylated cytosine with phosphorothioate linkage
  modified_base 17: mod_base = OTHER; note = 2'-O-methoxyethyl modified nucleotide with phosphorothioate linkage
  modified_base 18: mod_base = OTHER; note = 2'-O-methoxyethyl modified nucleotide with phosphorothioate linkage
  modified_base 19: mod_base = OTHER; note = 2'-O-methoxyethyl modified thymine
  misc_feature 1..4: note = RNA
  misc_feature 5..14: note = DNA
  misc_feature 15..19: note = RNA
acattcggctagcttcaat

SEQ ID NO: 207 - DNA, 20 bp, synthetic construct
  source 1..20: mol_type = other DNA
  modified_base 1: mod_base = OTHER; note = 2'-O-methoxyethyl modified thymine with phosphorothioate linkage
  modified_base 2: mod_base = OTHER; note = 2'-O-methoxyethyl modified thymine with phosphorothioate linkage
  modified_base 3: mod_base = OTHER; note = 2'-O-methoxyethyl modified thymine with phosphorothioate linkage
  modified_base 4: mod_base = OTHER; note = 2'-O-methoxyethyl modified nucleotide with phosphorothioate linkage
  modified_base 5: mod_base = OTHER; note = 2'-O-methoxyethyl modified thymine with phosphorothioate linkage
  modified_base 6: mod_base = OTHER; note = Nucleotide with phosphorothioate linkage
  modified_base 7: mod_base = OTHER; note = Nucleotide with phosphorothioate linkage
  modified_base 8: mod_base = OTHER; note = Nucleotide with phosphorothioate linkage
  modified_base 9: mod_base = OTHER; note = Nucleotide with phosphorothioate linkage
  modified_base 10: mod_base = OTHER; note = Nucleotide with phosphorothioate linkage
  modified_base 11: mod_base = OTHER; note = Nucleotide with phosphorothioate linkage
  modified_base 12: mod_base = OTHER; note = Nucleotide with phosphorothioate linkage
  modified_base 13: mod_base = OTHER; note = Nucleotide with phosphorothioate linkage
  modified_base 14: mod_base = OTHER; note = Nucleotide with phosphorothioate linkage
  modified_base 15: mod_base = OTHER; note = Nucleotide with phosphorothioate linkage
  modified_base 16: mod_base = OTHER; note = 2'-O-methoxyethyl modified thymine with phosphorothioate linkage
  modified_base 17: mod_base = OTHER; note = 2'-O-methoxyethyl modified thymine with phosphorothioate linkage
  modified_base 18: mod_base = OTHER; note = 2'-O-methoxyethyl modified nucleotide with phosphorothioate linkage
  modified_base 19: mod_base = OTHER; note = 2'-O-methoxyethyl modified nucleotide with phosphorothioate linkage
  modified_base 20: mod_base = OTHER; note = 2'-O-methoxyethyl modified methylated cytosine
  misc_feature 1..5: note = RNA
  misc_feature 6..15: note = DNA
  misc_feature 16..20: note = RNA
tttgttgcaataggcttgac

SEQ ID NO: 208 - DNA, 20 bp, synthetic construct
  source 1..20: mol_type = other DNA
  modified_base 1: mod_base = OTHER; note = 2'-O-methoxyethyl modified methylated cytosine with phosphorothioate linkage
  modified_base 2: mod_base = OTHER; note = 2'-O-methoxyethyl modified nucleotide with phosphorothioate linkage
  modified_base 3: mod_base = OTHER; note = 2'-O-methoxyethyl modified thymine with phosphorothioate linkage
  modified_base 4: mod_base = OTHER; note = 2'-O-methoxyethyl modified nucleotide with phosphorothioate linkage
  modified_base 5: mod_base = OTHER; note = 2'-O-methoxyethyl modified methylated cytosine with phosphorothioate linkage
  modified_base 6: mod_base = OTHER; note = Nucleotide with phosphorothioate linkage
  modified_base 7: mod_base = OTHER; note = Nucleotide with phosphorothioate linkage
  modified_base 8: mod_base = OTHER; note = Nucleotide with phosphorothioate linkage
  modified_base 9: mod_base = OTHER; note = Nucleotide with phosphorothioate linkage
  modified_base 10: mod_base = OTHER; note = Nucleotide with phosphorothioate linkage
  modified_base 11: mod_base = OTHER; note = Nucleotide with phosphorothioate linkage
  modified_base 12: mod_base = OTHER; note = Nucleotide with phosphorothioate linkage
  modified_base 13: mod_base = OTHER; note = Nucleotide with phosphorothioate linkage
  modified_base 14: mod_base = OTHER; note = Nucleotide with phosphorothioate linkage
  modified_base 15: mod_base = OTHER; note = Nucleotide with phosphorothioate linkage
  modified_base 16: mod_base = OTHER; note = 2'-O-methoxyethyl modified methylated cytosine with phosphorothioate linkage
  modified_base 17: mod_base = OTHER; note = 2'-O-methoxyethyl modified nucleotide with phosphorothioate linkage
  modified_base 18: mod_base = OTHER; note = 2'-O-methoxyethyl modified nucleotide with phosphorothioate linkage
  modified_base 19: mod_base = OTHER; note = 2'-O-methoxyethyl modified nucleotide with phosphorothioate linkage
  modified_base 20: mod_base = OTHER; note = 2'-O-methoxyethyl modified methylated cytosine
  misc_feature 1..5: note = RNA
  misc_feature 6..15: note = DNA
  misc_feature 16..20: note = RNA
cataccatatttcgccaaac

SEQ ID NO: 209 - DNA, 20 bp, synthetic construct
  source 1..20: mol_type = other DNA
  modified_base 1: mod_base = OTHER; note = 2'-O-methoxyethyl modified methylated cytosine with phosphorothioate linkage
  modified_base 2: mod_base = OTHER; note = 2'-O-methoxyethyl modified thymine with phosphorothioate linkage
  modified_base 3: mod_base = OTHER; note = 2'-O-methoxyethyl modified thymine with phosphorothioate linkage
  modified_base 4: mod_base = OTHER; note = 2'-O-methoxyethyl modified nucleotide with phosphorothioate linkage
  modified_base 5: mod_base = OTHER; note = 2'-O-methoxyethyl modified methylated cytosine with phosphorothioate linkage
  modified_base 6: mod_base = OTHER; note = Nucleotide with phosphorothioate linkage
  modified_base 7: mod_base = OTHER; note = Nucleotide with phosphorothioate linkage
  modified_base 8: mod_base = OTHER; note = Nucleotide with phosphorothioate linkage
  modified_base 9: mod_base = OTHER; note = Nucleotide with phosphorothioate linkage
  modified_base 10: mod_base = OTHER; note = Nucleotide with phosphorothioate linkage
  modified_base 11: mod_base = OTHER; note = Nucleotide with phosphorothioate linkage
  modified_base 12: mod_base = OTHER; note = Nucleotide with phosphorothioate linkage
  modified_base 13: mod_base = OTHER; note = Nucleotide with phosphorothioate linkage
  modified_base 14: mod_base = OTHER; note = Nucleotide with phosphorothioate linkage
  modified_base 15: mod_base = OTHER; note = Nucleotide with phosphorothioate linkage
  modified_base 16: mod_base = OTHER; note = 2'-O-methoxyethyl modified methylated cytosine with phosphorothioate linkage
  modified_base 17: mod_base = OTHER; note = 2'-O-methoxyethyl modified thymine with phosphorothioate linkage
  modified_base 18: mod_base = OTHER; note = 2'-O-methoxyethyl modified thymine with phosphorothioate linkage
  modified_base 19: mod_base = OTHER; note = 2'-O-methoxyethyl modified methylated cytosine with phosphorothioate linkage
  modified_base 20: mod_base = OTHER; note = 2'-O-methoxyethyl modified nucleotide
  misc_feature 1..5: note = RNA
  misc_feature 6..15: note = DNA
  misc_feature 16..20: note = RNA
cttacattcggctagcttca

SEQ ID NO: 210 - DNA, 18 bp, synthetic construct
  source 1..18: mol_type = other DNA
  modified_base 1: mod_base = OTHER; note = 2'-O-methoxyethyl modified thymine with phosphorothioate linkage
  modified_base 2: mod_base = OTHER; note = 2'-O-methoxyethyl modified methylated cytosine with phosphorothioate linkage
  modified_base 3: mod_base = OTHER; note = 2'-O-methoxyethyl modified nucleotide with phosphorothioate linkage
  modified_base 4: mod_base = OTHER; note = 2'-O-methoxyethyl modified methylated cytosine with phosphorothioate linkage
  modified_base 5: mod_base = OTHER; note = Nucleotide with phosphorothioate linkage
  modified_base 6: mod_base = OTHER; note = Nucleotide with phosphorothioate linkage
  modified_base 7: mod_base = OTHER; note = Nucleotide with phosphorothioate linkage
  modified_base 8: mod_base = OTHER; note = Nucleotide with phosphorothioate linkage
  modified_base 9: mod_base = OTHER; note = Nucleotide with phosphorothioate linkage
  modified_base 10: mod_base = OTHER; note = Nucleotide with phosphorothioate linkage
  modified_base 11: mod_base = OTHER; note = Nucleotide with phosphorothioate linkage
  modified_base 12: mod_base = OTHER; note = Nucleotide with phosphorothioate linkage
  modified_base 13: mod_base = OTHER; note = Nucleotide with phosphorothioate linkage
  modified_base 14: mod_base = OTHER; note = Nucleotide with phosphorothioate linkage
  modified_base 15: mod_base = OTHER; note = 2'-O-methoxyethyl modified nucleotide with phosphorothioate linkage
  modified_base 16: mod_base = OTHER; note = 2'-O-methoxyethyl modified nucleotide with phosphorothioate linkage
  modified_base 17: mod_base = OTHER; note = 2'-O-methoxyethyl modified nucleotide with phosphorothioate linkage
  modified_base 18: mod_base = OTHER; note = 2'-O-methoxyethyl modified thymine
  misc_feature 1..4: note = RNA
  misc_feature 5..14: note = DNA
  misc_feature 15..18: note = RNA
tcacattccacgttaggt

SEQ ID NO: 211 - DNA, 20 bp, synthetic construct
  source 1..20: mol_type = other DNA
  modified_base 1: mod_base = OTHER; note = 2'-O-methoxyethyl modified nucleotide with phosphorothioate linkage
  modified_base 2: mod_base = OTHER; note = 2'-O-methoxyethyl modified thymine with phosphorothioate linkage
  modified_base 3: mod_base = OTHER; note = 2'-O-methoxyethyl modified nucleotide with phosphorothioate linkage
  modified_base 4: mod_base = OTHER; note = 2'-O-methoxyethyl modified methylated cytosine with phosphorothioate linkage
  modified_base 5: mod_base = OTHER; note = 2'-O-methoxyethyl modified methylated cytosine with phosphorothioate linkage
  modified_base 6: mod_base = OTHER; note = Nucleotide with phosphorothioate linkage
  modified_base 7: mod_base = OTHER; note = Nucleotide with phosphorothioate linkage
  modified_base 8: mod_base = OTHER; note = Nucleotide with phosphorothioate linkage
  modified_base 9: mod_base = OTHER; note = Nucleotide with phosphorothioate linkage
  modified_base 10: mod_base = OTHER; note = Nucleotide with phosphorothioate linkage
  modified_base 11: mod_base = OTHER; note = Nucleotide with phosphorothioate linkage
  modified_base 12: mod_base = OTHER; note = Nucleotide with phosphorothioate linkage
  modified_base 13: mod_base = OTHER; note = Nucleotide with phosphorothioate linkage
  modified_base 14: mod_base = OTHER; note = Nucleotide with phosphorothioate linkage
  modified_base 15: mod_base = OTHER; note = Nucleotide with phosphorothioate linkage
  modified_base 16: mod_base = OTHER; note = 2'-O-methoxyethyl modified nucleotide with phosphorothioate linkage
  modified_base 17: mod_base = OTHER; note = 2'-O-methoxyethyl modified nucleotide with phosphorothioate linkage
  modified_base 18: mod_base = OTHER; note = 2'-O-methoxyethyl modified nucleotide with phosphorothioate linkage
  modified_base 19: mod_base = OTHER; note = 2'-O-methoxyethyl modified methylated cytosine with phosphorothioate linkage
  modified_base 20: mod_base = OTHER; note = 2'-O-methoxyethyl modified thymine
  misc_feature 1..5: note = RNA
  misc_feature 6..15: note = DNA
  misc_feature 16..20: note = RNA
ataccatatttcgccaaact

SEQ ID NO: 212 - DNA, 20 bp, synthetic construct
  source 1..20: mol_type = other DNA
  modified_base 1: mod_base = OTHER; note = 2'-O-methoxyethyl modified methylated cytosine with phosphorothioate linkage
  modified_base 2: mod_base = OTHER; note = 2'-O-methoxyethyl modified methylated cytosine with phosphorothioate linkage
  modified_base 3: mod_base = OTHER; note = 2'-O-methoxyethyl modified nucleotide with phosphorothioate linkage
  modified_base 4: mod_base = OTHER; note = 2'-O-methoxyethyl modified thymine with phosphorothioate linkage
  modified_base 5: mod_base = OTHER; note = 2'-O-methoxyethyl modified nucleotide with phosphorothioate linkage
  modified_base 6: mod_base = OTHER; note = Nucleotide with phosphorothioate linkage
  modified_base 7: mod_base = OTHER; note = Nucleotide with phosphorothioate linkage
  modified_base 8: mod_base = OTHER; note = Nucleotide with phosphorothioate linkage
  modified_base 9: mod_base = OTHER; note = Nucleotide with phosphorothioate linkage
  modified_base 10: mod_base = OTHER; note = Nucleotide with phosphorothioate linkage
  modified_base 11: mod_base = OTHER; note = Nucleotide with phosphorothioate linkage
  modified_base 12: mod_base = OTHER; note = Nucleotide with phosphorothioate linkage
  modified_base 13: mod_base = OTHER; note = Nucleotide with phosphorothioate linkage
  modified_base 14: mod_base = OTHER; note = Nucleotide with phosphorothioate linkage
  modified_base 15: mod_base = OTHER; note = Nucleotide with phosphorothioate linkage
  modified_base 16: mod_base = OTHER; note = 2'-O-methoxyethyl modified thymine with phosphorothioate linkage
  modified_base 17: mod_base = OTHER; note = 2'-O-methoxyethyl modified methylated cytosine with phosphorothioate linkage
  modified_base 18: mod_base = OTHER; note = 2'-O-methoxyethyl modified thymine with phosphorothioate linkage
  modified_base 19: mod_base = OTHER; note = 2'-O-methoxyethyl modified nucleotide with phosphorothioate linkage
  modified_base 20: mod_base = OTHER; note = 2'-O-methoxyethyl modified nucleotide
  misc_feature 1..5: note = RNA
  misc_feature 6..15: note = DNA
  misc_feature 16..20: note = RNA
ccgtgtctttctgtgtctgg

SEQ ID NO: 213 - DNA, 20 bp, synthetic construct
  source 1..20: mol_type = other DNA
  modified_base 1: mod_base = OTHER; note = 2'-O-methoxyethyl modified nucleotide with phosphorothioate linkage
  modified_base 2: mod_base = OTHER; note = 2'-O-methoxyethyl modified thymine with phosphorothioate linkage
  modified_base 3: mod_base = OTHER; note = 2'-O-methoxyethyl modified methylated cytosine with phosphorothioate linkage
  modified_base 4: mod_base = OTHER; note = 2'-O-methoxyethyl modified thymine with phosphorothioate linkage
  modified_base 5: mod_base = OTHER; note = 2'-O-methoxyethyl modified thymine with phosphorothioate linkage
  modified_base 6: mod_base = OTHER; note = Nucleotide with phosphorothioate linkage
  modified_base 7: mod_base = OTHER; note = Nucleotide with phosphorothioate linkage
  modified_base 8: mod_base = OTHER; note = Nucleotide with phosphorothioate linkage
  modified_base 9: mod_base = OTHER; note = Nucleotide with phosphorothioate linkage
  modified_base 10: mod_base = OTHER; note = Nucleotide with phosphorothioate linkage
  modified_base 11: mod_base = OTHER; note = Nucleotide with phosphorothioate linkage
  modified_base 12: mod_base = OTHER; note = Nucleotide with phosphorothioate linkage
  modified_base 13: mod_base = OTHER; note = Nucleotide with phosphorothioate linkage
  modified_base 14: mod_base = OTHER; note = Nucleotide with phosphorothioate linkage
  modified_base 15: mod_base = OTHER; note = Nucleotide with phosphorothioate linkage
  modified_base 16: mod_base = OTHER; note = 2'-O-methoxyethyl modified nucleotide with phosphorothioate linkage
  modified_base 17: mod_base = OTHER; note = 2'-O-methoxyethyl modified nucleotide with phosphorothioate linkage
  modified_base 18: mod_base = OTHER; note = 2'-O-methoxyethyl modified methylated cytosine with phosphorothioate linkage
  modified_base 19: mod_base = OTHER; note = 2'-O-methoxyethyl modified methylated cytosine with phosphorothioate linkage
  modified_base 20: mod_base = OTHER; note = 2'-O-methoxyethyl modified nucleotide
  misc_feature 1..5: note = RNA
  misc_feature 6..15: note = DNA
  misc_feature 16..20: note = RNA
gtctttctgtgtctgggcca

SEQ ID NO: 214 - DNA, 20 bp, synthetic construct
  source 1..20: mol_type = other DNA
  modified_base 1: mod_base = OTHER; note = 2'-O-methoxyethyl modified nucleotide with phosphorothioate linkage
  modified_base 2: mod_base = OTHER; note = 2'-O-methoxyethyl modified nucleotide with phosphorothioate linkage
  modified_base 3: mod_base = OTHER; note = 2'-O-methoxyethyl modified methylated cytosine with phosphorothioate linkage
  modified_base 4: mod_base = OTHER; note = 2'-O-methoxyethyl modified methylated cytosine with phosphorothioate linkage
  modified_base 5: mod_base = OTHER; note = 2'-O-methoxyethyl modified thymine with phosphorothioate linkage
  modified_base 6: mod_base = OTHER; note = Nucleotide with phosphorothioate linkage
  modified_base 7: mod_base = OTHER; note = Nucleotide with phosphorothioate linkage
  modified_base 8: mod_base = OTHER; note = Nucleotide with phosphorothioate linkage
  modified_base 9: mod_base = OTHER; note = Nucleotide with phosphorothioate linkage
  modified_base 10: mod_base = OTHER; note = Nucleotide with phosphorothioate linkage
  modified_base 11: mod_base = OTHER; note = Nucleotide with phosphorothioate linkage
  modified_base 12: mod_base = OTHER; note = Nucleotide with phosphorothioate linkage
  modified_base 13: mod_base = OTHER; note = Nucleotide with phosphorothioate linkage
  modified_base 14: mod_base = OTHER; note = Nucleotide with phosphorothioate linkage
  modified_base 15: mod_base = OTHER; note = Nucleotide with phosphorothioate linkage
  modified_base 16: mod_base = OTHER; note = 2'-O-methoxyethyl modified nucleotide with phosphorothioate linkage
  modified_base 17: mod_base = OTHER; note = 2'-O-methoxyethyl modified nucleotide with phosphorothioate linkage
  modified_base 18: mod_base = OTHER; note = 2'-O-methoxyethyl modified nucleotide with phosphorothioate linkage
  modified_base 19: mod_base = OTHER; note = 2'-O-methoxyethyl modified methylated cytosine with phosphorothioate linkage
  modified_base 20: mod_base = OTHER; note = 2'-O-methoxyethyl modified methylated cytosine
  misc_feature 1..5: note = RNA
  misc_feature 6..15: note = DNA
  misc_feature 16..20: note = RNA
aacctttctgtgtctgggcc

SEQ ID NO: 215 - DNA, 20 bp, synthetic construct
  source 1..20: mol_type = other DNA
  modified_base 1: mod_base = OTHER; note = 2'-O-methoxyethyl modified nucleotide with phosphorothioate linkage
  modified_base 2: mod_base = OTHER; note = 2'-O-methoxyethyl modified thymine with phosphorothioate linkage
  modified_base 3: mod_base = OTHER; note = 2'-O-methoxyethyl modified nucleotide with phosphorothioate linkage
  modified_base 4: mod_base = OTHER; note = 2'-O-methoxyethyl modified thymine with phosphorothioate linkage
  modified_base 5: mod_base = OTHER; note = 2'-O-methoxyethyl modified methylated cytosine with phosphorothioate linkage
  modified_base 6: mod_base = OTHER; note = Nucleotide with phosphorothioate linkage
  modified_base 7: mod_base = OTHER; note = Nucleotide with phosphorothioate linkage
  modified_base 8: mod_base = OTHER; note = Nucleotide with phosphorothioate linkage
  modified_base 9: mod_base = OTHER; note = Nucleotide with phosphorothioate linkage
  modified_base 10: mod_base = OTHER; note = Nucleotide with phosphorothioate linkage
  modified_base 11: mod_base = OTHER; note = Nucleotide with phosphorothioate linkage
  modified_base 12: mod_base = OTHER; note = Nucleotide with phosphorothioate linkage
  modified_base 13: mod_base = OTHER; note = Nucleotide with phosphorothioate linkage
  modified_base 14: mod_base = OTHER; note = Nucleotide with phosphorothioate linkage
  modified_base 15: mod_base = OTHER; note = Nucleotide with phosphorothioate linkage
  modified_base 16: mod_base = OTHER; note = 2'-O-methoxyethyl modified thymine with phosphorothioate linkage
  modified_base 17: mod_base = OTHER; note = 2'-O-methoxyethyl modified nucleotide with phosphorothioate linkage
  modified_base 18: mod_base = OTHER; note = 2'-O-methoxyethyl modified nucleotide with phosphorothioate linkage
  modified_base 19: mod_base = OTHER; note = 2'-O-methoxyethyl modified nucleotide with phosphorothioate linkage
  modified_base 20: mod_base = OTHER; note = 2'-O-methoxyethyl modified methylated cytosine
  misc_feature 1..5: note = RNA
  misc_feature 6..15: note = DNA
  misc_feature 16..20: note = RNA
gtgtctttctgtgtctgggc

SEQ ID NO: 216 - DNA, 20 bp, synthetic construct
  source 1..20: mol_type = other DNA
  modified_base 1: mod_base = OTHER; note = 2'-O-methoxyethyl modified nucleotide with phosphorothioate linkage
  modified_base 2: mod_base = OTHER; note = 2'-O-methoxyethyl modified thymine with phosphorothioate linkage
  modified_base 3: mod_base = OTHER; note = 2'-O-methoxyethyl modified nucleotide with phosphorothioate linkage
  modified_base 4: mod_base = OTHER; note = 2'-O-methoxyethyl modified nucleotide with phosphorothioate linkage
  modified_base 5: mod_base = OTHER; note = 2'-O-methoxyethyl modified nucleotide with phosphorothioate linkage
  modified_base 6: mod_base = OTHER; note = Nucleotide with phosphorothioate linkage
  modified_base 7: mod_base = OTHER; note = Nucleotide with phosphorothioate linkage
  modified_base 8: mod_base = OTHER; note = Nucleotide with phosphorothioate linkage
  modified_base 9: mod_base = OTHER; note = Nucleotide with phosphorothioate linkage
  modified_base 10: mod_base = OTHER; note = Nucleotide with phosphorothioate linkage
  modified_base 11: mod_base = OTHER; note = Nucleotide with phosphorothioate linkage
  modified_base 12: mod_base = OTHER; note = Nucleotide with phosphorothioate linkage
  modified_base 13: mod_base = OTHER; note = Nucleotide with phosphorothioate linkage
  modified_base 14: mod_base = OTHER; note = Nucleotide with phosphorothioate linkage
  modified_base 15: mod_base = OTHER; note = Nucleotide with phosphorothioate linkage
  modified_base 16: mod_base = OTHER; note = 2'-O-methoxyethyl modified nucleotide with phosphorothioate linkage
  modified_base 17: mod_base = OTHER; note = 2'-O-methoxyethyl modified thymine with phosphorothioate linkage
  modified_base 18: mod_base = OTHER; note = 2'-O-methoxyethyl modified nucleotide with phosphorothioate linkage
  modified_base 19: mod_base = OTHER; note = 2'-O-methoxyethyl modified thymine with phosphorothioate linkage
  modified_base 20: mod_base = OTHER; note = 2'-O-methoxyethyl modified methylated cytosine
  misc_feature 1..5: note = RNA
  misc_feature 6..15: note = DNA
  misc_feature 16..20: note = RNA
gtaggtaacctttctgtgtc

SEQ ID NO: 217 - DNA, 20 bp, synthetic construct
  source 1..20: mol_type = other DNA
  modified_base 1: mod_base = OTHER; note = 2'-O-methoxyethyl modified nucleotide with phosphorothioate linkage
  modified_base 2: mod_base = OTHER; note = 2'-O-methoxyethyl modified methylated cytosine with phosphorothioate linkage
  modified_base 3: mod_base = OTHER; note = 2'-O-methoxyethyl modified nucleotide with phosphorothioate linkage
  modified_base 4: mod_base = OTHER; note = 2'-O-methoxyethyl modified thymine with phosphorothioate linkage
  modified_base 5: mod_base = OTHER; note = 2'-O-methoxyethyl modified thymine with phosphorothioate linkage
  modified_base 6: mod_base = OTHER; note = Nucleotide with phosphorothioate linkage
  modified_base 7: mod_base = OTHER; note = Nucleotide with phosphorothioate linkage
  modified_base 8: mod_base = OTHER; note = Nucleotide with phosphorothioate linkage
  modified_base 9: mod_base = OTHER; note = Nucleotide with phosphorothioate linkage
  modified_base 10: mod_base = OTHER; note = Nucleotide with phosphorothioate linkage
  modified_base 11: mod_base = OTHER; note = Nucleotide with phosphorothioate linkage
  modified_base 12: mod_base = OTHER; note = Nucleotide with phosphorothioate linkage
  modified_base 13: mod_base = OTHER; note = Nucleotide with phosphorothioate linkage
  modified_base 14: mod_base = OTHER; note = Nucleotide with phosphorothioate linkage
  modified_base 15: mod_base = OTHER; note = Nucleotide with phosphorothioate linkage
  modified_base 16: mod_base = OTHER; note = 2'-O-methoxyethyl modified thymine with phosphorothioate linkage
  modified_base 17: mod_base = OTHER; note = 2'-O-methoxyethyl modified nucleotide with phosphorothioate linkage
  modified_base 18: mod_base = OTHER; note = 2'-O-methoxyethyl modified nucleotide with phosphorothioate linkage
  modified_base 19: mod_base = OTHER; note = 2'-O-methoxyethyl modified methylated cytosine with phosphorothioate linkage
  modified_base 20: mod_base = OTHER; note = 2'-O-methoxyethyl modified nucleotide
  misc_feature 1..5: note = RNA
  misc_feature 6..15: note = DNA
  misc_feature 16..20: note = RNA
acattccacgttaggtgaca

SEQ ID NO: 218 - DNA, 19 bp, synthetic construct
  source 1..19: mol_type = other DNA
  modified_base 1: mod_base = OTHER; note = 2'-O-methoxyethyl modified nucleotide with phosphorothioate linkage
  modified_base 2: mod_base = OTHER; note = 2'-O-methoxyethyl modified thymine with phosphorothioate linkage
  modified_base 3: mod_base = OTHER; note = 2'-O-methoxyethyl modified thymine with phosphorothioate linkage
  modified_base 4: mod_base = OTHER; note = 2'-O-methoxyethyl modified nucleotide with phosphorothioate linkage
  modified_base 5: mod_base = OTHER; note = Nucleotide with phosphorothioate linkage
  modified_base 6: mod_base = OTHER; note = Nucleotide with phosphorothioate linkage
  modified_base 7: mod_base = OTHER; note = Nucleotide with phosphorothioate linkage
  modified_base 8: mod_base = OTHER; note = Nucleotide with phosphorothioate linkage
  modified_base 9: mod_base = OTHER; note = Nucleotide with phosphorothioate linkage
  modified_base 10: mod_base = OTHER; note = Nucleotide with phosphorothioate linkage
  modified_base 11: mod_base = OTHER; note = Nucleotide with phosphorothioate linkage
  modified_base 12: mod_base = OTHER; note = Nucleotide with phosphorothioate linkage
  modified_base 13: mod_base = OTHER; note = Nucleotide with phosphorothioate linkage
  modified_base 14: mod_base = OTHER; note = Nucleotide with phosphorothioate linkage
  modified_base 15: mod_base = OTHER; note = 2'-O-methoxyethyl modified nucleotide with phosphorothioate linkage
  modified_base 16: mod_base = OTHER; note = 2'-O-methoxyethyl modified nucleotide with phosphorothioate linkage
  modified_base 17: mod_base = OTHER; note = 2'-O-methoxyethyl modified methylated cytosine with phosphorothioate linkage
  modified_base 18: mod_base = OTHER; note = 2'-O-methoxyethyl modified thymine with phosphorothioate linkage
  modified_base 19: mod_base = OTHER; note = 2'-O-methoxyethyl modified nucleotide
  misc_feature 1..4: note = RNA
  misc_feature 5..14: note = DNA
  misc_feature 15..19: note = RNA
gttgcaataggcttgacta

SEQ ID NO: 219 - DNA, 19 bp, synthetic construct
  source 1..19: mol_type = other DNA
  modified_base 1: mod_base = OTHER; note = 2'-O-methoxyethyl modified methylated cytosine with phosphorothioate linkage
  modified_base 2: mod_base = OTHER; note = 2'-O-methoxyethyl modified nucleotide with phosphorothioate linkage
  modified_base 3: mod_base = OTHER; note = 2'-O-methoxyethyl modified nucleotide with phosphorothioate linkage
  modified_base 4: mod_base = OTHER; note = 2'-O-methoxyethyl modified nucleotide with phosphorothioate linkage
  modified_base 5: mod_base = OTHER; note = Nucleotide with phosphorothioate linkage
  modified_base 6: mod_base = OTHER; note = Nucleotide with phosphorothioate linkage
  modified_base 7: mod_base = OTHER; note = Nucleotide with phosphorothioate linkage
  modified_base 8: mod_base = OTHER; note = Nucleotide with phosphorothioate linkage
  modified_base 9: mod_base = OTHER; note = Nucleotide with phosphorothioate linkage
  modified_base 10: mod_base = OTHER; note = Nucleotide with phosphorothioate linkage
  modified_base 11: mod_base = OTHER; note = Nucleotide with phosphorothioate linkage
  modified_base 12: mod_base = OTHER; note = Nucleotide with phosphorothioate linkage
  modified_base 13: mod_base = OTHER; note = Nucleotide with phosphorothioate linkage
  modified_base 14: mod_base = OTHER; note = Nucleotide with phosphorothioate linkage
  modified_base 15: mod_base = OTHER; note = 2'-O-methoxyethyl modified nucleotide with phosphorothioate linkage
  modified_base 16: mod_base = OTHER; note = 2'-O-methoxyethyl modified nucleotide with phosphorothioate linkage
  modified_base 17: mod_base = OTHER; note = 2'-O-methoxyethyl modified thymine with phosphorothioate linkage
  modified_base 18: mod_base = OTHER; note = 2'-O-methoxyethyl modified methylated cytosine with phosphorothioate linkage
  modified_base 19: mod_base = OTHER; note = 2'-O-methoxyethyl modified thymine
  misc_feature 1..4: note = RNA
  misc_feature 5..14: note = DNA
  misc_feature 15..19: note = RNA
caggttgtcacaccagtct

SEQ ID NO: 220 - DNA, 20 bp, synthetic construct
  source 1..20: mol_type = other DNA
  modified_base 1: mod_base = OTHER; note = 2'-O-methoxyethyl modified nucleotide with phosphorothioate linkage
  modified_base 2: mod_base = OTHER; note = 2'-O-methoxyethyl modified methylated cytosine with phosphorothioate linkage
  modified_base 3: mod_base = OTHER; note = 2'-O-methoxyethyl modified methylated cytosine with phosphorothioate linkage
  modified_base 4: mod_base = OTHER; note = 2'-O-methoxyethyl modified nucleotide with phosphorothioate linkage
  modified_base 5: mod_base = OTHER; note = 2'-O-methoxyethyl modified thymine with phosphorothioate linkage
  modified_base 6: mod_base = OTHER; note = Nucleotide with phosphorothioate linkage
  modified_base 7: mod_base = OTHER; note = Nucleotide with phosphorothioate linkage
  modified_base 8: mod_base = OTHER; note = Nucleotide with phosphorothioate linkage
  modified_base 9: mod_base = OTHER; note = Nucleotide with phosphorothioate linkage
  modified_base 10: mod_base = OTHER; note = Nucleotide with phosphorothioate linkage
  modified_base 11: mod_base = OTHER; note = Nucleotide with phosphorothioate linkage
  modified_base 12: mod_base = OTHER; note = Nucleotide with phosphorothioate linkage
  modified_base 13: mod_base = OTHER; note = Nucleotide with phosphorothioate linkage
  modified_base 14: mod_base = OTHER; note = Nucleotide with phosphorothioate linkage
  modified_base 15: mod_base = OTHER; note = Nucleotide with phosphorothioate linkage
  modified_base 16: mod_base = OTHER; note = 2'-O-methoxyethyl modified nucleotide with phosphorothioate linkage
  modified_base 17: mod_base = OTHER; note = 2'-O-methoxyethyl modified methylated cytosine with phosphorothioate linkage
  modified_base 18: mod_base = OTHER; note = 2'-O-methoxyethyl modified thymine with phosphorothioate linkage
  modified_base 19: mod_base = OTHER; note = 2'-O-methoxyethyl modified thymine with phosphorothioate linkage
  modified_base 20: mod_base = OTHER; note = 2'-O-methoxyethyl modified methylated cytosine
  misc_feature 1..5: note = RNA
  misc_feature 6..15: note = DNA
  misc_feature 16..20: note = RNA
accatatttcgccaaacttc

SEQ ID NO: 221 - DNA, 20 bp, synthetic construct
  source 1..20: mol_type = other DNA
  modified_base 1: mod_base = OTHER; note = 2'-O-methoxyethyl modified methylated cytosine with phosphorothioate linkage
  modified_base 2: mod_base = OTHER; note = 2'-O-methoxyethyl modified thymine with phosphorothioate linkage
  modified_base 3: mod_base = OTHER; note = 2'-O-methoxyethyl modified thymine with phosphorothioate linkage
  modified_base 4: mod_base = OTHER; note = 2'-O-methoxyethyl modified nucleotide with phosphorothioate linkage
  modified_base 5: mod_base = OTHER; note = 2'-O-methoxyethyl modified methylated cytosine with phosphorothioate linkage
  modified_base 6: mod_base = OTHER; note = Nucleotide with phosphorothioate linkage
  modified_base 7: mod_base = OTHER; note = Nucleotide with phosphorothioate linkage
  modified_base 8: mod_base = OTHER; note = Nucleotide with phosphorothioate linkage
  modified_base 9: mod_base = OTHER; note = Nucleotide with phosphorothioate linkage
  modified_base 10: mod_base = OTHER; note = Nucleotide with phosphorothioate linkage
  modified_base 11: mod_base = OTHER; note = Nucleotide with phosphorothioate linkage
  modified_base 12: mod_base = OTHER; note = Nucleotide with phosphorothioate linkage
  modified_base 13: mod_base = OTHER; note = Nucleotide with phosphorothioate linkage
  modified_base 14: mod_base = OTHER; note = Nucleotide with phosphorothioate linkage
  modified_base 15: mod_base = OTHER; note = Nucleotide with phosphorothioate linkage
  modified_base 16: mod_base = OTHER; note = 2'-O-methoxyethyl modified nucleotide with phosphorothioate linkage
  modified_base 17: mod_base = OTHER; note = 2'-O-methoxyethyl modified methylated cytosine with phosphorothioate linkage
  modified_base 18: mod_base = OTHER; note = 2'-O-methoxyethyl modified nucleotide with phosphorothioate linkage
  modified_base 19: mod_base = OTHER; note = 2'-O-methoxyethyl modified thymine with phosphorothioate linkage
  modified_base 20: mod_base = OTHER; note = 2'-O-methoxyethyl modified methylated cytosine
  misc_feature 1..5: note = RNA
  misc_feature 6..15: note = DNA
  misc_feature 16..20: note = RNA
cttacccggacaagtgcatc

SEQ ID NO: 222 - DNA, 19 bp, synthetic construct
  source 1..19: mol_type = other DNA
  modified_base 1: mod_base = OTHER; note = 2'-O-methoxyethyl modified thymine with phosphorothioate linkage
  modified_base 2: mod_base = OTHER; note = 2'-O-methoxyethyl modified thymine with phosphorothioate linkage
  modified_base 3: mod_base = OTHER; note = 2'-O-methoxyethyl modified nucleotide with phosphorothioate linkage
  modified_base 4: mod_base = OTHER; note = 2'-O-methoxyethyl modified methylated cytosine with phosphorothioate linkage
  modified_base 5: mod_base = OTHER; note = Nucleotide with phosphorothioate linkage
  modified_base 6: mod_base = OTHER; note = Nucleotide with phosphorothioate linkage
  modified_base 7: mod_base = OTHER; note = Nucleotide with phosphorothioate linkage
  modified_base 8: mod_base = OTHER; note = Nucleotide with phosphorothioate linkage
  modified_base 9: mod_base = OTHER; note = Nucleotide with phosphorothioate linkage
  modified_base 10: mod_base = OTHER; note = Nucleotide with phosphorothioate linkage
  modified_base 11: mod_base = OTHER; note = Nucleotide with phosphorothioate linkage
  modified_base 12: mod_base = OTHER; note = Nucleotide with phosphorothioate linkage
  modified_base 13: mod_base = OTHER; note = Nucleotide with phosphorothioate linkage
  modified_base 14: mod_base = OTHER; note = Nucleotide with phosphorothioate linkage
  modified_base 15: mod_base = OTHER; note = 2'-O-methoxyethyl modified nucleotide with phosphorothioate linkage
  modified_base 16: mod_base = OTHER; note = 2'-O-methoxyethyl modified methylated cytosine with phosphorothioate linkage
  modified_base 17: mod_base = OTHER; note = 2'-O-methoxyethyl modified nucleotide with phosphorothioate linkage
  modified_base 18: mod_base = OTHER; note = 2'-O-methoxyethyl modified thymine with phosphorothioate linkage
  modified_base 19: mod_base = OTHER; note = 2'-O-methoxyethyl modified methylated cytosine
  misc_feature 1..4: note = RNA
  misc_feature 5..14: note = DNA
  misc_feature 15..19: note = RNA
ttacccggacaagtgcatc

SEQ ID NO: 223 - DNA, 18 bp, synthetic construct
  source 1..18: mol_type = other DNA
  modified_base 1: mod_base = OTHER; note = 2'-O-methoxyethyl modified nucleotide with phosphorothioate linkage
  modified_base 2: mod_base = OTHER; note = 2'-O-methoxyethyl modified nucleotide with phosphorothioate linkage
  modified_base 3: mod_base = OTHER; note = 2'-O-methoxyethyl modified methylated cytosine with phosphorothioate linkage
  modified_base 4: mod_base = OTHER; note = 2'-O-methoxyethyl modified methylated cytosine with phosphorothioate linkage
  modified_base 5: mod_base = OTHER; note = Nucleotide with phosphorothioate linkage
  modified_base 6: mod_base = OTHER; note = Nucleotide with phosphorothioate linkage
  modified_base 7: mod_base = OTHER; note = Nucleotide with phosphorothioate linkage
  modified_base 8: mod_base = OTHER; note = Nucleotide with phosphorothioate linkage
  modified_base 9: mod_base = OTHER; note = Nucleotide with phosphorothioate linkage
  modified_base 10: mod_base = OTHER; note = Nucleotide with phosphorothioate linkage
  modified_base 11: mod_base = OTHER; note = Nucleotide with phosphorothioate linkage
  modified_base 12: mod_base = OTHER; note = Nucleotide with phosphorothioate linkage
  modified_base 13: mod_base = OTHER; note = Nucleotide with phosphorothioate linkage
  modified_base 14: mod_base = OTHER; note = Nucleotide with phosphorothioate linkage
  modified_base 15: mod_base = OTHER; note = 2'-O-methoxyethyl modified nucleotide with phosphorothioate linkage
  modified_base 16: mod_base = OTHER; note = 2'-O-methoxyethyl modified thymine with phosphorothioate linkage
  modified_base 17: mod_base = OTHER; note = 2'-O-methoxyethyl modified methylated cytosine with phosphorothioate linkage
  modified_base 18: mod_base = OTHER; note = 2'-O-methoxyethyl modified nucleotide
  misc_feature 1..4: note = RNA
  misc_feature 5..14: note = DNA
  misc_feature 15..18: note = RNA
ggccattcggtgacatca

SEQ ID NO: 224 - DNA, 20 bp, synthetic construct
  source 1..20: mol_type = other DNA
  modified_base 1: mod_base = OTHER; note = 2'-O-methoxyethyl modified thymine with phosphorothioate linkage
  modified_base 2: mod_base = OTHER; note = 2'-O-methoxyethyl modified nucleotide with phosphorothioate linkage
  modified_base 3: mod_base = OTHER; note = 2'-O-methoxyethyl modified nucleotide with phosphorothioate linkage
  modified_base 4: mod_base = OTHER; note = 2'-O-methoxyethyl modified thymine with phosphorothioate linkage
  modified_base 5: mod_base = OTHER; note = 2'-O-methoxyethyl modified methylated cytosine with phosphorothioate linkage
  modified_base 6: mod_base = OTHER; note = Nucleotide with phosphorothioate linkage
  modified_base 7: mod_base = OTHER; note = Nucleotide with phosphorothioate linkage
  modified_base 8: mod_base = OTHER; note = Nucleotide with phosphorothioate linkage
  modified_base 9: mod_base = OTHER; note = Nucleotide with phosphorothioate linkage
  modified_base 10: mod_base = OTHER; note = Nucleotide with phosphorothioate linkage
  modified_base 11: mod_base = OTHER; note = Nucleotide with phosphorothioate linkage
  modified_base 12: mod_base = OTHER; note = Nucleotide with phosphorothioate linkage
  modified_base 13: mod_base = OTHER; note = Nucleotide with phosphorothioate linkage
  modified_base 14: mod_base = OTHER; note = Nucleotide with phosphorothioate linkage
  modified_base 15: mod_base = OTHER; note = Nucleotide with phosphorothioate linkage
  modified_base 16: mod_base = OTHER; note = 2'-O-methoxyethyl modified thymine with phosphorothioate linkage
  modified_base 17: mod_base = OTHER; note = 2'-O-methoxyethyl modified nucleotide with phosphorothioate linkage
  modified_base 18: mod_base = OTHER; note = 2'-O-methoxyethyl modified thymine with phosphorothioate linkage
  modified_base 19: mod_base = OTHER; note = 2'-O-methoxyethyl modified nucleotide with phosphorothioate linkage
  modified_base 20: mod_base = OTHER; note = 2'-O-methoxyethyl modified nucleotide
  misc_feature 1..5: note = RNA
  misc_feature 6..15: note = DNA
  misc_feature 16..20: note = RNA
tgatcttttacaagctgtgg

SEQ ID NO: 225 - DNA, 19 bp, synthetic construct
  source 1..19: mol_type = other DNA
  modified_base 1: mod_base = OTHER; note = 2'-O-methoxyethyl modified nucleotide with phosphorothioate linkage
  modified_base 2: mod_base = OTHER; note = 2'-O-methoxyethyl modified nucleotide with phosphorothioate linkage
  modified_base 3: mod_base = OTHER; note = 2'-O-methoxyethyl modified methylated cytosine with phosphorothioate linkage
  modified_base 4: mod_base = OTHER; note = 2'-O-methoxyethyl modified nucleotide with phosphorothioate linkage
  modified_base 5: mod_base = OTHER; note = Nucleotide with phosphorothioate linkage
  modified_base 6: mod_base = OTHER; note = Nucleotide with phosphorothioate linkage
  modified_base 7: mod_base = OTHER; note = Nucleotide with phosphorothioate linkage
  modified_base 8: mod_base = OTHER; note = Nucleotide with phosphorothioate linkage
  modified_base 9: mod_base = OTHER; note = Nucleotide with phosphorothioate linkage
  modified_base 10: mod_base = OTHER; note = Nucleotide with phosphorothioate linkage
  modified_base 11: mod_base = OTHER; note = Nucleotide with phosphorothioate linkage
  modified_base 12: mod_base = OTHER; note = Nucleotide with phosphorothioate linkage
  modified_base 13: mod_base = OTHER; note = Nucleotide with phosphorothioate linkage
  modified_base 14: mod_base = OTHER; note = Nucleotide with phosphorothioate linkage
  modified_base 15: mod_base = OTHER; note = 2'-O-methoxyethyl modified nucleotide with phosphorothioate linkage
  modified_base 16: mod_base = OTHER; note = 2'-O-methoxyethyl modified thymine with phosphorothioate linkage
  modified_base 17: mod_base = OTHER; note = 2'-O-methoxyethyl modified nucleotide with phosphorothioate linkage
  modified_base 18: mod_base = OTHER; note = 2'-O-methoxyethyl modified nucleotide with phosphorothioate linkage
  modified_base 19: mod_base = OTHER; note = 2'-O-methoxyethyl modified nucleotide
  misc_feature 1..4: note = RNA
  misc_feature 5..14: note = DNA
  misc_feature 15..19: note = RNA
agcaagtatgagatgtagg

SEQ ID NO: 226 - DNA, 19 bp, synthetic construct
  source 1..19: mol_type = other DNA
  modified_base 1: mod_base = OTHER; note = 2'-O-methoxyethyl modified nucleotide with phosphorothioate linkage
  modified_base 2: mod_base = OTHER; note = 2'-O-methoxyethyl modified methylated cytosine with phosphorothioate linkage
  modified_base 3: mod_base = OTHER; note = 2'-O-methoxyethyl modified methylated cytosine with phosphorothioate linkage
  modified_base 4: mod_base = OTHER; note = 2'-O-methoxyethyl modified nucleotide with phosphorothioate linkage
  modified_base 5: mod_base = OTHER; note = Nucleotide with phosphorothioate linkage
  modified_base 6: mod_base = OTHER; note = Nucleotide with phosphorothioate linkage
  modified_base 7: mod_base = OTHER; note = Nucleotide with phosphorothioate linkage
  modified_base 8: mod_base = OTHER; note = Nucleotide with phosphorothioate linkage
  modified_base 9: mod_base = OTHER; note = Nucleotide with phosphorothioate linkage
  modified_base 10: mod_base = OTHER; note = Nucleotide with phosphorothioate linkage
  modified_base 11: mod_base = OTHER; note = Nucleotide with phosphorothioate linkage
  modified_base 12: mod_base = OTHER; note = Nucleotide with phosphorothioate linkage
  modified_base 13: mod_base = OTHER; note = Nucleotide with phosphorothioate linkage
  modified_base 14: mod_base = OTHER; note = Nucleotide with phosphorothioate linkage
  modified_base 15: mod_base = OTHER; note = 2'-O-methoxyethyl modified nucleotide with phosphorothioate linkage
  modified_base 16: mod_base = OTHER; note = 2'-O-methoxyethyl modified nucleotide with phosphorothioate linkage
  modified_base 17: mod_base = OTHER; note = 2'-O-methoxyethyl modified methylated cytosine with phosphorothioate linkage
  modified_base 18: mod_base = OTHER; note = 2'-O-methoxyethyl modified thymine with phosphorothioate linkage
  modified_base 19: mod_base = OTHER; note = 2'-O-methoxyethyl modified thymine
  misc_feature 1..4: note = RNA
  misc_feature 5..14: note = DNA
  misc_feature 15..19: note = RNA
accatatttcgccaaactt

SEQ ID NO: 227 - DNA, 20 bp, synthetic construct
  source 1..20: mol_type = other DNA
  modified_base 1: mod_base = OTHER; note = 2'-O-methoxyethyl modified nucleotide with phosphorothioate linkage
  modified_base 2: mod_base = OTHER; note = 2'-O-methoxyethyl modified nucleotide with phosphorothioate linkage
  modified_base 3: mod_base = OTHER; note = 2'-O-methoxyethyl modified thymine with phosphorothioate linkage
  modified_base 4: mod_base = OTHER; note = 2'-O-methoxyethyl modified nucleotide with phosphorothioate linkage
  modified_base 5: mod_base = OTHER; note = 2'-O-methoxyethyl modified nucleotide with phosphorothioate linkage
  modified_base 6: mod_base = OTHER; note = Nucleotide with phosphorothioate linkage
  modified_base 7: mod_base = OTHER; note = Nucleotide with phosphorothioate linkage
  modified_base 8: mod_base = OTHER; note = Nucleotide with phosphorothioate linkage
  modified_base 9: mod_base = OTHER; note = Nucleotide with phosphorothioate linkage
  modified_base 10: mod_base = OTHER; note = Nucleotide with phosphorothioate linkage
  modified_base 11: mod_base = OTHER; note = Nucleotide with phosphorothioate linkage
  modified_base 12: mod_base = OTHER; note = Nucleotide with phosphorothioate linkage
  modified_base 13: mod_base = OTHER; note = Nucleotide with phosphorothioate linkage
  modified_base 14: mod_base = OTHER; note = Nucleotide with phosphorothioate linkage
  modified_base 15: mod_base = OTHER; note = Nucleotide with phosphorothioate linkage
  modified_base 16: mod_base = OTHER; note = 2'-O-methoxyethyl modified thymine with phosphorothioate linkage
  modified_base 17: mod_base = OTHER; note = 2'-O-methoxyethyl modified methylated cytosine with phosphorothioate linkage
  modified_base 18: mod_base = OTHER; note = 2'-O-methoxyethyl modified thymine with phosphorothioate linkage
  modified_base 19: mod_base = OTHER; note = 2'-O-methoxyethyl modified nucleotide with phosphorothioate linkage
  modified_base 20: mod_base = OTHER; note = 2'-O-methoxyethyl modified nucleotide
  misc_feature 1..5: note = RNA
  misc_feature 6..15: note = DNA
  misc_feature 16..20: note = RNA
ggtaacctttctgtgtctgg

SEQ ID NO: 228 - DNA, 19 bp, synthetic construct
  source 1..19: mol_type = other DNA
  modified_base 1: mod_base = OTHER; note = 2'-O-methoxyethyl modified nucleotide with phosphorothioate linkage
  modified_base 2: mod_base = OTHER; note = 2'-O-methoxyethyl modified methylated cytosine with phosphorothioate linkage
  modified_base 3: mod_base = OTHER; note = 2'-O-methoxyethyl modified nucleotide with phosphorothioate linkage
  modified_base 4: mod_base = OTHER; note = 2'-O-methoxyethyl modified nucleotide with phosphorothioate linkage
  modified_base 5: mod_base = OTHER; note = Nucleotide with phosphorothioate linkage
  modified_base 6: mod_base = OTHER; note = Nucleotide with phosphorothioate linkage
  modified_base 7: mod_base = OTHER; note = Nucleotide with phosphorothioate linkage
  modified_base 8: mod_base = OTHER; note = Nucleotide with phosphorothioate linkage
  modified_base 9: mod_base = OTHER; note = Nucleotide with phosphorothioate linkage
  modified_base 10: mod_base = OTHER; note = Nucleotide with phosphorothioate linkage
  modified_base 11: mod_base = OTHER; note = Nucleotide with phosphorothioate linkage
  modified_base 12: mod_base = OTHER; note = Nucleotide with phosphorothioate linkage
  modified_base 13: mod_base = OTHER; note = Nucleotide with phosphorothioate linkage
  modified_base 14: mod_base = OTHER; note = Nucleotide with phosphorothioate linkage
  modified_base 15: mod_base = OTHER; note = 2'-O-methoxyethyl modified methylated cytosine with phosphorothioate linkage
  modified_base 16: mod_base = OTHER; note = 2'-O-methoxyethyl modified nucleotide with phosphorothioate linkage
  modified_base 17: mod_base = OTHER; note = 2'-O-methoxyethyl modified nucleotide with phosphorothioate linkage
  modified_base 18: mod_base = OTHER; note = 2'-O-methoxyethyl modified thymine with phosphorothioate linkage
  modified_base 19: mod_base = OTHER; note = 2'-O-methoxyethyl modified methylated cytosine
  misc_feature 1..4: note = RNA
  misc_feature 5..14: note = DNA
  misc_feature 15..19: note = RNA
acaggttgtcacaccagtc

SEQ ID NO: 229 - DNA, 18 bp, synthetic construct
  source 1..18: mol_type = other DNA
  modified_base 1: mod_base = OTHER; note = 2'-O-methoxyethyl modified nucleotide with phosphorothioate linkage
  modified_base 2: mod_base = OTHER; note = 2'-O-methoxyethyl modified thymine with phosphorothioate linkage
  modified_base 3: mod_base = OTHER; note = 2'-O-methoxyethyl modified thymine with phosphorothioate linkage
  modified_base 4: mod_base = OTHER; note = 2'-O-methoxyethyl modified nucleotide with phosphorothioate linkage
  modified_base 5: mod_base = OTHER; note = Nucleotide with phosphorothioate linkage
  modified_base 6: mod_base = OTHER; note = Nucleotide with phosphorothioate linkage
  modified_base 7: mod_base = OTHER; note = Nucleotide with phosphorothioate linkage
  modified_base 8: mod_base = OTHER; note = Nucleotide with phosphorothioate linkage
  modified_base 9: mod_base = OTHER; note = Nucleotide with phosphorothioate linkage
  modified_base 10: mod_base = OTHER; note = Nucleotide with phosphorothioate linkage
  modified_base 11: mod_base = OTHER; note = Nucleotide with phosphorothioate linkage
  modified_base 12: mod_base = OTHER; note = Nucleotide with phosphorothioate linkage
  modified_base 13: mod_base = OTHER; note = Nucleotide with phosphorothioate linkage
  modified_base 14: mod_base = OTHER; note = Nucleotide with phosphorothioate linkage
  modified_base 15: mod_base = OTHER; note = 2'-O-methoxyethyl modified nucleotide with phosphorothioate linkage
  modified_base 16: mod_base = OTHER; note = 2'-O-methoxyethyl modified nucleotide with phosphorothioate linkage
  modified_base 17: mod_base = OTHER; note = 2'-O-methoxyethyl modified methylated cytosine with phosphorothioate linkage
  modified_base 18: mod_base = OTHER; note = 2'-O-methoxyethyl modified thymine
  misc_feature 1..4: note = RNA
  misc_feature 5..14: note = DNA
  misc_feature 15..18: note = RNA
gttgcaataggcttgact

SEQ ID NO: 230 - DNA, 20 bp, synthetic construct
  source 1..20: mol_type = other DNA
  modified_base 1: mod_base = OTHER; note = 2'-O-methoxyethyl modified thymine with phosphorothioate linkage
  modified_base 2: mod_base = OTHER; note = 2'-O-methoxyethyl modified nucleotide with phosphorothioate linkage
  modified_base 3: mod_base = OTHER; note = 2'-O-methoxyethyl modified thymine with phosphorothioate linkage
  modified_base 4: mod_base = OTHER; note = 2'-O-methoxyethyl modified nucleotide with phosphorothioate linkage
  modified_base 5: mod_base = OTHER; note = 2'-O-methoxyethyl modified nucleotide with phosphorothioate linkage
  modified_base 6: mod_base = OTHER; note = Nucleotide with phosphorothioate linkage
  modified_base 7: mod_base = OTHER; note = Nucleotide with phosphorothioate linkage
  modified_base 8: mod_base = OTHER; note = Nucleotide with phosphorothioate linkage
  modified_base 9: mod_base = OTHER; note = Nucleotide with phosphorothioate linkage
  modified_base 10: mod_base = OTHER; note = Nucleotide with phosphorothioate linkage
  modified_base 11: mod_base = OTHER; note = Nucleotide with phosphorothioate linkage
  modified_base 12: mod_base = OTHER; note = Nucleotide with phosphorothioate linkage
  modified_base 13: mod_base = OTHER; note = Nucleotide with phosphorothioate linkage
  modified_base 14: mod_base = OTHER; note = Nucleotide with phosphorothioate linkage
  modified_base 15: mod_base = OTHER; note = Nucleotide with phosphorothioate linkage
  modified_base 16: mod_base = OTHER; note = 2'-O-methoxyethyl modified nucleotide with phosphorothioate linkage
  modified_base 17: mod_base = OTHER; note = 2'-O-methoxyethyl modified thymine with phosphorothioate linkage
  modified_base 18: mod_base = OTHER; note = 2'-O-methoxyethyl modified methylated cytosine with phosphorothioate linkage
  modified_base 19: mod_base = OTHER; note = 2'-O-methoxyethyl modified thymine with phosphorothioate linkage
  modified_base 20: mod_base = OTHER; note = 2'-O-methoxyethyl modified nucleotide
  misc_feature 1..5: note = RNA
  misc_feature 6..15: note = DNA
  misc_feature 16..20: note = RNA
tgtgaacataccaatatctg

SEQ ID NO: 231 - DNA, 20 bp, synthetic construct
  source 1..20: mol_type = other DNA
  modified_base 1: mod_base = OTHER; note = 2'-O-methoxyethyl modified nucleotide with phosphorothioate linkage
  modified_base 2: mod_base = OTHER; note = 2'-O-methoxyethyl modified methylated cytosine with phosphorothioate linkage
  modified_base 3: mod_base = OTHER; note = 2'-O-methoxyethyl modified thymine with phosphorothioate linkage
  modified_base 4: mod_base = OTHER; note = 2'-O-methoxyethyl modified nucleotide with phosphorothioate linkage
  modified_base 5: mod_base = OTHER; note = 2'-O-methoxyethyl modified thymine with phosphorothioate linkage
  modified_base 6: mod_base = OTHER; note = Nucleotide with phosphorothioate linkage
  modified_base 7: mod_base = OTHER; note = Nucleotide with phosphorothioate linkage
  modified_base 8: mod_base = OTHER; note = Nucleotide with phosphorothioate linkage
  modified_base 9: mod_base = OTHER; note = Nucleotide with phosphorothioate linkage
  modified_base 10: mod_base = OTHER; note = Nucleotide with phosphorothioate linkage
  modified_base 11: mod_base = OTHER; note = Nucleotide with phosphorothioate linkage
  modified_base 12: mod_base = OTHER; note = Nucleotide with phosphorothioate linkage
  modified_base 13: mod_base = OTHER; note = Nucleotide with phosphorothioate linkage
  modified_base 14: mod_base = OTHER; note = Nucleotide with phosphorothioate linkage
  modified_base 15: mod_base = OTHER; note = Nucleotide with phosphorothioate linkage
  modified_base 16: mod_base = OTHER; note = 2'-O-methoxyethyl modified thymine with phosphorothioate linkage
  modified_base 17: mod_base = OTHER; note = 2'-O-methoxyethyl modified methylated cytosine with phosphorothioate linkage
  modified_base 18: mod_base = OTHER; note = 2'-O-methoxyethyl modified thymine with phosphorothioate linkage
  modified_base 19: mod_base = OTHER; note = 2'-O-methoxyethyl modified nucleotide with phosphorothioate linkage
  modified_base 20: mod_base = OTHER; note = 2'-O-methoxyethyl modified thymine
  misc_feature 1..5: note = RNA
  misc_feature 6..15: note = DNA
  misc_feature 16..20: note = RNA
actgtacatgcgaattctat

SEQ ID NO: 232 - DNA, 20 bp, synthetic construct
  source 1..20: mol_type = other DNA
  modified_base 1: mod_base = OTHER; note = 2'-O-methoxyethyl modified thymine with phosphorothioate linkage
  modified_base 2: mod_base = OTHER; note = 2'-O-methoxyethyl modified thymine with phosphorothioate linkage
  modified_base 3: mod_base = OTHER; note = 2'-O-methoxyethyl modified nucleotide with phosphorothioate linkage
  modified_base 4: mod_base = OTHER; note = 2'-O-methoxyethyl modified methylated cytosine with phosphorothioate linkage
  modified_base 5: mod_base = OTHER; note = 2'-O-methoxyethyl modified methylated cytosine with phosphorothioate linkage
  modified_base 6: mod_base = OTHER; note = Nucleotide with phosphorothioate linkage
  modified_base 7: mod_base = OTHER; note = Nucleotide with phosphorothioate linkage
  modified_base 8: mod_base = OTHER; note = Nucleotide with phosphorothioate linkage
  modified_base 9: mod_base = OTHER; note = Nucleotide with phosphorothioate linkage
  modified_base 10: mod_base = OTHER; note = Nucleotide with phosphorothioate linkage
  modified_base 11: mod_base = OTHER; note = Nucleotide with phosphorothioate linkage
  modified_base 12: mod_base = OTHER; note = Nucleotide with phosphorothioate linkage
  modified_base 13: mod_base = OTHER; note = Nucleotide with phosphorothioate linkage
  modified_base 14: mod_base = OTHER; note = Nucleotide with phosphorothioate linkage
  modified_base 15: mod_base = OTHER; note = Nucleotide with phosphorothioate linkage
  modified_base 16: mod_base = OTHER; note = 2'-O-methoxyethyl modified methylated cytosine with phosphorothioate linkage
  modified_base 17: mod_base = OTHER; note = 2'-O-methoxyethyl modified nucleotide with phosphorothioate linkage
  modified_base 18: mod_base = OTHER; note = 2'-O-methoxyethyl modified thymine with phosphorothioate linkage
  modified_base 19: mod_base = OTHER; note = 2'-O-methoxyethyl modified methylated cytosine with phosphorothioate linkage
  modified_base 20: mod_base = OTHER; note = 2'-O-methoxyethyl modified nucleotide
  misc_feature 1..5: note = RNA
  misc_feature 6..15: note = DNA
  misc_feature 16..20: note = RNA
ttacccggacaagtgcatca

SEQ ID NO: 233 - DNA, 20 bp, synthetic construct
  source 1..20: mol_type = other DNA
  modified_base 1: mod_base = OTHER; note = 2'-O-methoxyethyl modified thymine with phosphorothioate linkage
  modified_base 2: mod_base = OTHER; note = 2'-O-methoxyethyl modified nucleotide with phosphorothioate linkage
  modified_base 3: mod_base = OTHER; note = 2'-O-methoxyethyl modified thymine with phosphorothioate linkage
  modified_base 4: mod_base = OTHER; note = 2'-O-methoxyethyl modified nucleotide with phosphorothioate linkage
  modified_base 5: mod_base = OTHER; note = 2'-O-methoxyethyl modified nucleotide with phosphorothioate linkage
  modified_base 6: mod_base = OTHER; note = Nucleotide with phosphorothioate linkage
  modified_base 7: mod_base = OTHER; note = Nucleotide with phosphorothioate linkage
  modified_base 8: mod_base = OTHER; note = Nucleotide with phosphorothioate linkage
  modified_base 9: mod_base = OTHER; note = Nucleotide with phosphorothioate linkage
  modified_base 10: mod_base = OTHER; note = Nucleotide with phosphorothioate linkage
  modified_base 11: mod_base = OTHER; note = Nucleotide with phosphorothioate linkage
  modified_base 12: mod_base = OTHER; note = Nucleotide with phosphorothioate linkage
  modified_base 13: mod_base = OTHER; note = Nucleotide with phosphorothioate linkage
  modified_base 14: mod_base = OTHER; note = Nucleotide with phosphorothioate linkage
  modified_base 15: mod_base = OTHER; note = Nucleotide with phosphorothioate linkage
  modified_base 16: mod_base = OTHER; note = 2'-O-methoxyethyl modified thymine with phosphorothioate linkage
  modified_base 17: mod_base = OTHER; note = 2'-O-methoxyethyl modified nucleotide with phosphorothioate linkage
  modified_base 18: mod_base = OTHER; note = 2'-O-methoxyethyl modified thymine with phosphorothioate linkage
  modified_base 19: mod_base = OTHER; note = 2'-O-methoxyethyl modified nucleotide with phosphorothioate linkage
  modified_base 20: mod_base = OTHER; note = 2'-O-methoxyethyl modified thymine
  misc_feature 1..5: note = RNA
  misc_feature 6..15: note = DNA
  misc_feature 16..20: note = RNA
tgtaggtaacctttctgtgt

SEQ ID NO: 234 - DNA, 20 bp, synthetic construct
  source 1..20: mol_type = other DNA
  modified_base 1: mod_base = OTHER; note = 2'-O-methoxyethyl modified thymine with phosphorothioate linkage
  modified_base 2: mod_base = OTHER; note = 2'-O-methoxyethyl modified thymine with phosphorothioate linkage
  modified_base 3: mod_base = OTHER; note = 2'-O-methoxyethyl modified thymine with phosphorothioate linkage
  modified_base 4: mod_base = OTHER; note = 2'-O-methoxyethyl modified methylated cytosine with phosphorothioate linkage
  modified_base 5: mod_base = OTHER; note = 2'-O-methoxyethyl modified methylated cytosine with phosphorothioate linkage
  modified_base 6: mod_base = OTHER; note = Nucleotide with phosphorothioate linkage
  modified_base 7: mod_base = OTHER; note = Nucleotide with phosphorothioate linkage
  modified_base 8: mod_base = OTHER; note = Nucleotide with phosphorothioate linkage
  modified_base 9: mod_base = OTHER; note = Nucleotide with phosphorothioate linkage
  modified_base 10: mod_base = OTHER; note = Nucleotide with phosphorothioate linkage
  modified_base 11: mod_base = OTHER; note = Nucleotide with phosphorothioate linkage
  modified_base 12: mod_base = OTHER; note = Nucleotide with phosphorothioate linkage
  modified_base 13: mod_base = OTHER; note = Nucleotide with phosphorothioate linkage
  modified_base 14: mod_base = OTHER; note = Nucleotide with phosphorothioate linkage
  modified_base 15: mod_base = OTHER; note = Nucleotide with phosphorothioate linkage
  modified_base 16: mod_base = OTHER; note = 2'-O-methoxyethyl modified thymine with phosphorothioate linkage
  modified_base 17: mod_base = OTHER; note = 2'-O-methoxyethyl modified nucleotide with phosphorothioate linkage
  modified_base 18: mod_base = OTHER; note = 2'-O-methoxyethyl modified nucleotide with phosphorothioate linkage
  modified_base 19: mod_base = OTHER; note = 2'-O-methoxyethyl modified thymine with phosphorothioate linkage
  modified_base 20: mod_base = OTHER; note = 2'-O-methoxyethyl modified methylated cytosine
  misc_feature 1..5: note = RNA
  misc_feature 6..15: note = DNA
  misc_feature 16..20: note = RNA
tttcccagaactccctaatc

SEQ ID NO: 235 - DNA, 18 bp, synthetic construct
  source 1..18: mol_type = other DNA
  modified_base 1: mod_base = OTHER; note = 2'-O-methoxyethyl modified methylated cytosine with phosphorothioate linkage
  modified_base 2: mod_base = OTHER; note = 2'-O-methoxyethyl modified nucleotide with phosphorothioate linkage
  modified_base 3: mod_base = OTHER; note = 2'-O-methoxyethyl modified nucleotide with phosphorothioate linkage
  modified_base 4: mod_base = OTHER; note = 2'-O-methoxyethyl modified nucleotide with phosphorothioate linkage
  modified_base 5: mod_base = OTHER; note = Nucleotide with phosphorothioate linkage
  modified_base 6: mod_base = OTHER; note = Nucleotide with phosphorothioate linkage
  modified_base 7: mod_base = OTHER; note = Nucleotide with phosphorothioate linkage
  modified_base 8: mod_base = OTHER; note = Nucleotide with phosphorothioate linkage
  modified_base 9: mod_base = OTHER; note = Nucleotide with phosphorothioate linkage
  modified_base 10: mod_base = OTHER; note = Nucleotide with phosphorothioate linkage
  modified_base 11: mod_base = OTHER; note = Nucleotide with phosphorothioate linkage
  modified_base 12: mod_base = OTHER; note = Nucleotide with phosphorothioate linkage
  modified_base 13: mod_base = OTHER; note = Nucleotide with phosphorothioate linkage
  modified_base 14: mod_base = OTHER; note = Nucleotide with phosphorothioate linkage
  modified_base 15: mod_base = OTHER; note = 2'-O-methoxyethyl modified nucleotide with phosphorothioate linkage
  modified_base 16: mod_base = OTHER; note = 2'-O-methoxyethyl modified nucleotide with phosphorothioate linkage
  modified_base 17: mod_base = OTHER; note = 2'-O-methoxyethyl modified nucleotide with phosphorothioate linkage
  modified_base 18: mod_base = OTHER; note = 2'-O-methoxyethyl modified thymine
  misc_feature 1..4: note = RNA
  misc_feature 5..14: note = DNA
  misc_feature 15..18: note = RNA
caagtatgagatgtaggt

SEQ ID NO: 236 - DNA, 19 bp, synthetic construct
  source 1..19: mol_type = other DNA
  modified_base 1: mod_base = OTHER; note = 2'-O-methoxyethyl modified nucleotide with phosphorothioate linkage
  modified_base 2: mod_base = OTHER; note = 2'-O-methoxyethyl modified nucleotide with phosphorothioate linkage
  modified_base 3: mod_base = OTHER; note = 2'-O-methoxyethyl modified nucleotide with phosphorothioate linkage
  modified_base 4: mod_base = OTHER; note = 2'-O-methoxyethyl modified methylated cytosine with phosphorothioate linkage
  modified_base 5: mod_base = OTHER; note = Nucleotide with phosphorothioate linkage
  modified_base 6: mod_base = OTHER; note = Nucleotide with phosphorothioate linkage
  modified_base 7: mod_base = OTHER; note = Nucleotide with phosphorothioate linkage
  modified_base 8: mod_base = OTHER; note = Nucleotide with phosphorothioate linkage
  modified_base 9: mod_base = OTHER; note = Nucleotide with phosphorothioate linkage
  modified_base 10: mod_base = OTHER; note = Nucleotide with phosphorothioate linkage
  modified_base 11: mod_base = OTHER; note = Nucleotide with phosphorothioate linkage
  modified_base 12: mod_base = OTHER; note = Nucleotide with phosphorothioate linkage
  modified_base 13: mod_base = OTHER; note = Nucleotide with phosphorothioate linkage
  modified_base 14: mod_base = OTHER; note = Nucleotide with phosphorothioate linkage
  modified_base 15: mod_base = OTHER; note = 2'-O-methoxyethyl modified methylated cytosine with phosphorothioate linkage
  modified_base 16: mod_base = OTHER; note = 2'-O-methoxyethyl modified nucleotide with phosphorothioate linkage
  modified_base 17: mod_base = OTHER; note = 2'-O-methoxyethyl modified nucleotide with phosphorothioate linkage
  modified_base 18: mod_base = OTHER; note = 2'-O-methoxyethyl modified thymine with phosphorothioate linkage
  modified_base 19: mod_base = OTHER; note = 2'-O-methoxyethyl modified nucleotide
  misc_feature 1..4: note = RNA
  misc_feature 5..14: note = DNA
  misc_feature 15..19: note = RNA
aagctgtggccattcggtg

SEQ ID NO: 237 - DNA, 20 bp, synthetic construct
  source 1..20: mol_type = other DNA
  modified_base 1: mod_base = OTHER; note = 2'-O-methoxyethyl modified nucleotide with phosphorothioate linkage
  modified_base 2: mod_base = OTHER; note = 2'-O-methoxyethyl modified nucleotide with phosphorothioate linkage
  modified_base 3: mod_base = OTHER; note = 2'-O-methoxyethyl modified methylated cytosine with phosphorothioate linkage
  modified_base 4: mod_base = OTHER; note = 2'-O-methoxyethyl modified methylated cytosine with phosphorothioate linkage
  modified_base 5: mod_base = OTHER; note = 2'-O-methoxyethyl modified nucleotide with phosphorothioate linkage
  modified_base 6: mod_base = OTHER; note = Nucleotide with phosphorothioate linkage
  modified_base 7: mod_base = OTHER; note = Nucleotide with phosphorothioate linkage
  modified_base 8: mod_base = OTHER; note = Nucleotide with phosphorothioate linkage
  modified_base 9: mod_base = OTHER; note = Nucleotide with phosphorothioate linkage
  modified_base 10: mod_base = OTHER; note = Nucleotide with phosphorothioate linkage
  modified_base 11: mod_base = OTHER; note = Nucleotide with phosphorothioate linkage
  modified_base 12: mod_base = OTHER; note = Nucleotide with phosphorothioate linkage
  modified_base 13: mod_base = OTHER; note = Nucleotide with phosphorothioate linkage
  modified_base 14: mod_base = OTHER; note = Nucleotide with phosphorothioate linkage
  modified_base 15: mod_base = OTHER; note = Nucleotide with phosphorothioate linkage
  modified_base 16: mod_base = OTHER; note = 2'-O-methoxyethyl modified thymine with phosphorothioate linkage
  modified_base 17: mod_base = OTHER; note = 2'-O-methoxyethyl modified methylated cytosine with phosphorothioate linkage
  modified_base 18: mod_base = OTHER; note = 2'-O-methoxyethyl modified nucleotide with phosphorothioate linkage
  modified_base 19: mod_base = OTHER; note = 2'-O-methoxyethyl modified nucleotide with phosphorothioate linkage
  modified_base 20: mod_base = OTHER; note = 2'-O-methoxyethyl modified nucleotide
  misc_feature 1..5: note = RNA
  misc_feature 6..15: note = DNA
  misc_feature 16..20: note = RNA
ggccattcggtgacatcagg

SEQ ID NO: 238 - DNA, 17 bp, synthetic construct
  source 1..17: mol_type = other DNA
  modified_base 1: mod_base = OTHER; note = 2'-O-methoxyethyl modified thymine with phosphorothioate linkage
  modified_base 2: mod_base = OTHER; note = 2'-O-methoxyethyl modified nucleotide with phosphorothioate linkage
  modified_base 3: mod_base = OTHER; note = 2'-O-methoxyethyl modified methylated cytosine with phosphorothioate linkage
  modified_base 4: mod_base = OTHER; note = Nucleotide with phosphorothioate linkage
  modified_base 5: mod_base = OTHER; note = Nucleotide with phosphorothioate linkage
  modified_base 6: mod_base = OTHER; note = Nucleotide with phosphorothioate linkage
  modified_base 7: mod_base = OTHER; note = Nucleotide with phosphorothioate linkage
  modified_base 8: mod_base = OTHER; note = Nucleotide with phosphorothioate linkage
  modified_base 9: mod_base = OTHER; note = Nucleotide with phosphorothioate linkage
  modified_base 10: mod_base = OTHER; note = Nucleotide with phosphorothioate linkage
  modified_base 11: mod_base = OTHER; note = Nucleotide with phosphorothioate linkage
  modified_base 12: mod_base = OTHER; note = Nucleotide with phosphorothioate linkage
  modified_base 13: mod_base = OTHER; note = Nucleotide with phosphorothioate linkage
  modified_base 14: mod_base = OTHER; note = 2'-O-methoxyethyl modified nucleotide with phosphorothioate linkage
  modified_base 15: mod_base = OTHER; note = 2'-O-methoxyethyl modified methylated cytosine with phosphorothioate linkage
  modified_base 16: mod_base = OTHER; note = 2'-O-methoxyethyl modified thymine with phosphorothioate linkage
  modified_base 17: mod_base = OTHER; note = 2'-O-methoxyethyl modified nucleotide
  misc_feature 1..3: note = RNA
  misc_feature 4..13: note = DNA
  misc_feature 14..17: note = RNA
tgcaataggcttgacta

SEQ ID NO: 239 - DNA, 19 bp, synthetic construct
  source 1..19: mol_type = other DNA
  modified_base 1: mod_base = OTHER; note = 2'-O-methoxyethyl modified nucleotide with phosphorothioate linkage
  modified_base 2: mod_base = OTHER; note = 2'-O-methoxyethyl modified nucleotide with phosphorothioate linkage
  modified_base 3: mod_base = OTHER; note = 2'-O-methoxyethyl modified methylated cytosine with phosphorothioate linkage
  modified_base 4: mod_base = OTHER; note = 2'-O-methoxyethyl modified methylated cytosine with phosphorothioate linkage
  modified_base 5: mod_base = OTHER; note = Nucleotide with phosphorothioate linkage
  modified_base 6: mod_base = OTHER; note = Nucleotide with phosphorothioate linkage
  modified_base 7: mod_base = OTHER; note = Nucleotide with phosphorothioate linkage
  modified_base 8: mod_base = OTHER; note = Nucleotide with phosphorothioate linkage
  modified_base 9: mod_base = OTHER; note = Nucleotide with phosphorothioate linkage
  modified_base 10: mod_base = OTHER; note = Nucleotide with phosphorothioate linkage
  modified_base 11: mod_base = OTHER; note = Nucleotide with phosphorothioate linkage
  modified_base 12: mod_base = OTHER; note = Nucleotide with phosphorothioate linkage
  modified_base 13: mod_base = OTHER; note = Nucleotide with phosphorothioate linkage
  modified_base 14: mod_base = OTHER; note = Nucleotide with phosphorothioate linkage
  modified_base 15: mod_base = OTHER; note = 2'-O-methoxyethyl modified nucleotide with phosphorothioate linkage
  modified_base 16: mod_base = OTHER; note = 2'-O-methoxyethyl modified thymine with phosphorothioate linkage
  modified_base 17: mod_base = OTHER; note = 2'-O-methoxyethyl modified methylated cytosine with phosphorothioate linkage
  modified_base 18: mod_base = OTHER; note = 2'-O-methoxyethyl modified nucleotide with phosphorothioate linkage
  modified_base 19: mod_base = OTHER; note = 2'-O-methoxyethyl modified nucleotide
  misc_feature 1..4: note = RNA
  misc_feature 5..14: note = DNA
  misc_feature 15..19: note = RNA
ggccattcggtgacatcag

SEQ ID NO: 240 - DNA, 19 bp, synthetic construct
  source 1..19: mol_type = other DNA
  modified_base 1: mod_base = OTHER; note = 2'-O-methoxyethyl modified nucleotide with phosphorothioate linkage
  modified_base 2: mod_base = OTHER; note = 2'-O-methoxyethyl modified nucleotide with phosphorothioate linkage
  modified_base 3: mod_base = OTHER; note = 2'-O-methoxyethyl modified methylated cytosine with phosphorothioate linkage
  modified_base 4: mod_base = OTHER; note = 2'-O-methoxyethyl modified thymine with phosphorothioate linkage
  modified_base 5: mod_base = OTHER; note = Nucleotide with phosphorothioate linkage
  modified_base 6: mod_base = OTHER; note = Nucleotide with phosphorothioate linkage
  modified_base 7: mod_base = OTHER; note = Nucleotide with phosphorothioate linkage
  modified_base 8: mod_base = OTHER; note = Nucleotide with phosphorothioate linkage
  modified_base 9: mod_base = OTHER; note = Nucleotide with phosphorothioate linkage
  modified_base 10: mod_base = OTHER; note = Nucleotide with phosphorothioate linkage
  modified_base 11: mod_base = OTHER; note = Nucleotide with phosphorothioate linkage
  modified_base 12: mod_base = OTHER; note = Nucleotide with phosphorothioate linkage
  modified_base 13: mod_base = OTHER; note = Nucleotide with phosphorothioate linkage
  modified_base 14: mod_base = OTHER; note = Nucleotide with phosphorothioate linkage
  modified_base 15: mod_base = OTHER; note = 2'-O-methoxyethyl modified nucleotide with phosphorothioate linkage
  modified_base 16: mod_base = OTHER; note = 2'-O-methoxyethyl modified nucleotide with phosphorothioate linkage
  modified_base 17: mod_base = OTHER; note = 2'-O-methoxyethyl modified thymine with phosphorothioate linkage
  modified_base 18: mod_base = OTHER; note = 2'-O-methoxyethyl modified methylated cytosine with phosphorothioate linkage
  modified_base 19: mod_base = OTHER; note = 2'-O-methoxyethyl modified thymine
  misc_feature 1..4: note = RNA
  misc_feature 5..14: note = DNA
  misc_feature 15..19: note = RNA
agctttgtcacaccagtct

SEQ ID NO: 241 - DNA, 19 bp, synthetic construct
  source 1..19: mol_type = other DNA
  modified_base 1: mod_base = OTHER; note = 2'-O-methoxyethyl modified thymine with phosphorothioate linkage
  modified_base 2: mod_base = OTHER; note = 2'-O-methoxyethyl modified methylated cytosine with phosphorothioate linkage
  modified_base 3: mod_base = OTHER; note = 2'-O-methoxyethyl modified nucleotide with phosphorothioate linkage
  modified_base 4: mod_base = OTHER; note = 2'-O-methoxyethyl modified thymine with phosphorothioate linkage
  modified_base 5: mod_base = OTHER; note = Nucleotide with phosphorothioate linkage
  modified_base 6: mod_base = OTHER; note = Nucleotide with phosphorothioate linkage
  modified_base 7: mod_base = OTHER; note = Nucleotide with phosphorothioate linkage
  modified_base 8: mod_base = OTHER; note = Nucleotide with phosphorothioate linkage
  modified_base 9: mod_base = OTHER; note = Nucleotide with phosphorothioate linkage
  modified_base 10: mod_base = OTHER; note = Nucleotide with phosphorothioate linkage
  modified_base 11: mod_base = OTHER; note = Nucleotide with phosphorothioate linkage
  modified_base 12: mod_base = OTHER; note = Nucleotide with phosphorothioate linkage
  modified_base 13: mod_base = OTHER; note = Nucleotide with phosphorothioate linkage
  modified_base 14: mod_base = OTHER; note = Nucleotide with phosphorothioate linkage
  modified_base 15: mod_base = OTHER; note = 2'-O-methoxyethyl modified thymine with phosphorothioate linkage
  modified_base 16: mod_base = OTHER; note = 2'-O-methoxyethyl modified nucleotide with phosphorothioate linkage
  modified_base 17: mod_base = OTHER; note = 2'-O-methoxyethyl modified nucleotide with phosphorothioate linkage
  modified_base 18: mod_base = OTHER; note = 2'-O-methoxyethyl modified thymine with phosphorothioate linkage
  modified_base 19: mod_base = OTHER; note = 2'-O-methoxyethyl modified methylated cytosine
  misc_feature 1..4: note = RNA
  misc_feature 5..14: note = DNA
  misc_feature 15..19: note = RNA
tcattctccgaatctggtc

SEQ ID NO: 242 - DNA, 20 bp, synthetic construct
  source 1..20: mol_type = other DNA
  modified_base 1: mod_base = OTHER; note = 2'-O-methoxyethyl modified nucleotide with phosphorothioate linkage
  modified_base 2: mod_base = OTHER; note = 2'-O-methoxyethyl modified thymine with phosphorothioate linkage
  modified_base 3: mod_base = OTHER; note = 2'-O-methoxyethyl modified nucleotide with phosphorothioate linkage
  modified_base 4: mod_base = OTHER; note = 2'-O-methoxyethyl modified nucleotide with phosphorothioate linkage
  modified_base 5: mod_base = OTHER; note = 2'-O-methoxyethyl modified methylated cytosine with phosphorothioate linkage
  modified_base 6: mod_base = OTHER; note = Nucleotide with phosphorothioate linkage
  modified_base 7: mod_base = OTHER; note = Nucleotide with phosphorothioate linkage
  modified_base 8: mod_base = OTHER; note = Nucleotide with phosphorothioate linkage
  modified_base 9: mod_base = OTHER; note = Nucleotide with phosphorothioate linkage
  modified_base 10: mod_base = OTHER; note = Nucleotide with phosphorothioate linkage
  modified_base 11: mod_base = OTHER; note = Nucleotide with phosphorothioate linkage
  modified_base 12: mod_base = OTHER; note = Nucleotide with phosphorothioate linkage
  modified_base 13: mod_base = OTHER; note = Nucleotide with phosphorothioate linkage
  modified_base 14: mod_base = OTHER; note = Nucleotide with phosphorothioate linkage
  modified_base 15: mod_base = OTHER; note = Nucleotide with phosphorothioate linkage
  modified_base 16: mod_base = OTHER; note = 2'-O-methoxyethyl modified nucleotide with phosphorothioate linkage
  modified_base 17: mod_base = OTHER; note = 2'-O-methoxyethyl modified nucleotide with phosphorothioate linkage
  modified_base 18: mod_base = OTHER; note = 2'-O-methoxyethyl modified nucleotide with phosphorothioate linkage
  modified_base 19: mod_base = OTHER; note = 2'-O-methoxyethyl modified nucleotide with phosphorothioate linkage
  modified_base 20: mod_base = OTHER; note = 2'-O-methoxyethyl modified nucleotide
  misc_feature 1..5: note = RNA
  misc_feature 6..15: note = DNA
  misc_feature 16..20: note = RNA
gtaacactttcacgcaaaaa

SEQ ID NO: 243 - DNA, 20 bp, synthetic construct
  source 1..20: mol_type = other DNA
  modified_base 1: mod_base = OTHER; note = 2'-O-methoxyethyl modified nucleotide with phosphorothioate linkage
  modified_base 2: mod_base = OTHER; note = 2'-O-methoxyethyl modified nucleotide with phosphorothioate linkage
  modified_base 3: mod_base = OTHER; note = 2'-O-methoxyethyl modified nucleotide with phosphorothioate linkage
  modified_base 4: mod_base = OTHER; note = 2'-O-methoxyethyl modified thymine with phosphorothioate linkage
  modified_base 5: mod_base = OTHER; note = 2'-O-methoxyethyl modified nucleotide with phosphorothioate linkage
  modified_base 6: mod_base = OTHER; note = Nucleotide with phosphorothioate linkage
  modified_base 7: mod_base = OTHER; note = Nucleotide with phosphorothioate linkage
  modified_base 8: mod_base = OTHER; note = Nucleotide with phosphorothioate linkage
  modified_base 9: mod_base = OTHER; note = Nucleotide with phosphorothioate linkage
  modified_base 10: mod_base = OTHER; note = Nucleotide with phosphorothioate linkage
  modified_base 11: mod_base = OTHER; note = Nucleotide with phosphorothioate linkage
  modified_base 12: mod_base = OTHER; note = Nucleotide with phosphorothioate linkage
  modified_base 13: mod_base = OTHER; note = Nucleotide with phosphorothioate linkage
  modified_base 14: mod_base = OTHER; note = Nucleotide with phosphorothioate linkage
  modified_base 15: mod_base = OTHER; note = Nucleotide with phosphorothioate linkage
  modified_base 16: mod_base = OTHER; note = 2'-O-methoxyethyl modified nucleotide with phosphorothioate linkage
  modified_base 17: mod_base = OTHER; note = 2'-O-methoxyethyl modified thymine with phosphorothioate linkage
  modified_base 18: mod_base = OTHER; note = 2'-O-methoxyethyl modified methylated cytosine with phosphorothioate linkage
  modified_base 19: mod_base = OTHER; note = 2'-O-methoxyethyl modified thymine with phosphorothioate linkage
  modified_base 20: mod_base = OTHER; note = 2'-O-methoxyethyl modified nucleotide
  misc_feature 1..5: note = RNA
  misc_feature 6..15: note = DNA
  misc_feature 16..20: note = RNA
aggtaacctttctgtgtctg

SEQ ID NO: 244 - DNA, 19 bp, synthetic construct
  source 1..19: mol_type = other DNA
  modified_base 1: mod_base = OTHER; note = 2'-O-methoxyethyl modified thymine with phosphorothioate linkage
  modified_base 2: mod_base = OTHER; note = 2'-O-methoxyethyl modified thymine with phosphorothioate linkage
  modified_base 3: mod_base = OTHER; note = 2'-O-methoxyethyl modified thymine with phosphorothioate linkage
  modified_base 4: mod_base = OTHER; note = 2'-O-methoxyethyl modified nucleotide with phosphorothioate linkage
  modified_base 5: mod_base = OTHER; note = Nucleotide with phosphorothioate linkage
  modified_base 6: mod_base = OTHER; note = Nucleotide with phosphorothioate linkage
  modified_base 7: mod_base = OTHER; note = Nucleotide with phosphorothioate linkage
  modified_base 8: mod_base = OTHER; note = Nucleotide with phosphorothioate linkage
  modified_base 9: mod_base = OTHER; note = Nucleotide with phosphorothioate linkage
  modified_base 10: mod_base = OTHER; note = Nucleotide with phosphorothioate linkage
  modified_base 11: mod_base = OTHER; note = Nucleotide with phosphorothioate linkage
  modified_base 12: mod_base = OTHER; note = Nucleotide with phosphorothioate linkage
  modified_base 13: mod_base = OTHER; note = Nucleotide with phosphorothioate linkage
  modified_base 14: mod_base = OTHER; note = Nucleotide with phosphorothioate linkage
  modified_base 15: mod_base = OTHER; note = 2'-O-methoxyethyl modified methylated cytosine with phosphorothioate linkage
  modified_base 16: mod_base = OTHER; note = 2'-O-methoxyethyl modified thymine with phosphorothioate linkage
  modified_base 17: mod_base = OTHER; note = 2'-O-methoxyethyl modified thymine with phosphorothioate linkage
  modified_base 18: mod_base = OTHER; note = 2'-O-methoxyethyl modified nucleotide with phosphorothioate linkage
  modified_base 19: mod_base = OTHER; note = 2'-O-methoxyethyl modified nucleotide
  misc_feature 1..4: note = RNA
  misc_feature 5..14: note = DNA
  misc_feature 15..19: note = RNA
tttgttgcaataggcttga

SEQ ID NO: 245 - DNA, 20 bp, synthetic construct
  source 1..20: mol_type = other DNA
  modified_base 1: mod_base = OTHER; note = 2'-O-methoxyethyl modified nucleotide with phosphorothioate linkage
  modified_base 2: mod_base = OTHER; note = 2'-O-methoxyethyl modified thymine with phosphorothioate linkage
  modified_base 3: mod_base = OTHER; note = 2'-O-methoxyethyl modified thymine with phosphorothioate linkage
  modified_base 4: mod_base = OTHER; note = 2'-O-methoxyethyl modified thymine with phosphorothioate linkage
  modified_base 5: mod_base = OTHER; note = 2'-O-methoxyethyl modified methylated cytosine with phosphorothioate linkage
  modified_base 6: mod_base = OTHER; note = Nucleotide with phosphorothioate linkage
  modified_base 7: mod_base = OTHER; note = Nucleotide with phosphorothioate linkage
  modified_base 8: mod_base = OTHER; note = Nucleotide with phosphorothioate linkage
  modified_base 9: mod_base = OTHER; note = Nucleotide with phosphorothioate linkage
  modified_base 10: mod_base = OTHER; note = Nucleotide with phosphorothioate linkage
  modified_base 11: mod_base = OTHER; note = Nucleotide with phosphorothioate linkage
  modified_base 12: mod_base = OTHER; note = Nucleotide with phosphorothioate linkage
  modified_base 13: mod_base = OTHER; note = Nucleotide with phosphorothioate linkage
  modified_base 14: mod_base = OTHER; note = Nucleotide with phosphorothioate linkage
  modified_base 15: mod_base = OTHER; note = Nucleotide with phosphorothioate linkage
  modified_base 16: mod_base = OTHER; note = 2'-O-methoxyethyl modified thymine with phosphorothioate linkage
  modified_base 17: mod_base = OTHER; note = 2'-O-methoxyethyl modified nucleotide with phosphorothioate linkage
  modified_base 18: mod_base = OTHER; note = 2'-O-methoxyethyl modified nucleotide with phosphorothioate linkage
  modified_base 19: mod_base = OTHER; note = 2'-O-methoxyethyl modified nucleotide with phosphorothioate linkage
  modified_base 20: mod_base = OTHER; note = 2'-O-methoxyethyl modified nucleotide
  misc_feature 1..5: note = RNA
  misc_feature 6..15: note = DNA
  misc_feature 16..20: note = RNA
atttcgccaaacttctgagg

SEQ ID NO: 246 - DNA, 19 bp, synthetic construct
  source 1..19: mol_type = other DNA
  modified_base 1: mod_base = OTHER; note = 2'-O-methoxyethyl modified thymine with phosphorothioate linkage
  modified_base 2: mod_base = OTHER; note = 2'-O-methoxyethyl modified methylated cytosine with phosphorothioate linkage
  modified_base 3: mod_base = OTHER; note = 2'-O-methoxyethyl modified thymine with phosphorothioate linkage
  modified_base 4: mod_base = OTHER; note = 2'-O-methoxyethyl modified methylated cytosine with phosphorothioate linkage
  modified_base 5: mod_base = OTHER; note = Nucleotide with phosphorothioate linkage
  modified_base 6: mod_base = OTHER; note = Nucleotide with phosphorothioate linkage
  modified_base 7: mod_base = OTHER; note = Nucleotide with phosphorothioate linkage
  modified_base 8: mod_base = OTHER; note = Nucleotide with phosphorothioate linkage
  modified_base 9: mod_base = OTHER; note = Nucleotide with phosphorothioate linkage
  modified_base 10: mod_base = OTHER; note = Nucleotide with phosphorothioate linkage
  modified_base 11: mod_base = OTHER; note = Nucleotide with phosphorothioate linkage
  modified_base 12: mod_base = OTHER; note = Nucleotide with phosphorothioate linkage
  modified_base 13: mod_base = OTHER; note = Nucleotide with phosphorothioate linkage
  modified_base 14: mod_base = OTHER; note = Nucleotide with phosphorothioate linkage
  modified_base 15: mod_base = OTHER; note = 2'-O-methoxyethyl modified nucleotide with phosphorothioate linkage
  modified_base 16: mod_base = OTHER; note = 2'-O-methoxyethyl modified nucleotide with phosphorothioate linkage
  modified_base 17: mod_base = OTHER; note = 2'-O-methoxyethyl modified nucleotide with phosphorothioate linkage
  modified_base 18: mod_base = OTHER; note = 2'-O-methoxyethyl modified methylated cytosine with phosphorothioate linkage
  modified_base 19: mod_base = OTHER; note = 2'-O-methoxyethyl modified thymine
  misc_feature 1..4: note = RNA
  misc_feature 5..14: note = DNA
  misc_feature 15..19: note = RNA
tctcaaggtaagctgagct

SEQ ID NO: 247 - DNA, 20 bp, synthetic construct
  source 1..20: mol_type = other DNA
  modified_base 1: mod_base = OTHER; note = 2'-O-methoxyethyl modified thymine with phosphorothioate linkage
  modified_base 2: mod_base = OTHER; note = 2'-O-methoxyethyl modified thymine with phosphorothioate linkage
  modified_base 3: mod_base = OTHER; note = 2'-O-methoxyethyl modified methylated cytosine with phosphorothioate linkage
  modified_base 4: mod_base = OTHER; note = 2'-O-methoxyethyl modified methylated cytosine with phosphorothioate linkage
  modified_base 5: mod_base = OTHER; note = 2'-O-methoxyethyl modified methylated cytosine with phosphorothioate linkage
  modified_base 6: mod_base = OTHER; note = Nucleotide with phosphorothioate linkage
  modified_base 7: mod_base = OTHER; note = Nucleotide with phosphorothioate linkage
  modified_base 8: mod_base = OTHER; note = Nucleotide with phosphorothioate linkage
  modified_base 9: mod_base = OTHER; note = Nucleotide with phosphorothioate linkage
  modified_base 10: mod_base = OTHER; note = Nucleotide with phosphorothioate linkage
  modified_base 11: mod_base = OTHER; note = Nucleotide with phosphorothioate linkage
  modified_base 12: mod_base = OTHER; note = Nucleotide with phosphorothioate linkage
  modified_base 13: mod_base = OTHER; note = Nucleotide with phosphorothioate linkage
  modified_base 14: mod_base = OTHER; note = Nucleotide with phosphorothioate linkage
  modified_base 15: mod_base = OTHER; note = Nucleotide with phosphorothioate linkage
  modified_base 16: mod_base = OTHER; note = 2'-O-methoxyethyl modified nucleotide with phosphorothioate linkage
  modified_base 17: mod_base = OTHER; note = 2'-O-methoxyethyl modified nucleotide with phosphorothioate linkage
  modified_base 18: mod_base = OTHER; note = 2'-O-methoxyethyl modified thymine with phosphorothioate linkage
  modified_base 19: mod_base = OTHER; note = 2'-O-methoxyethyl modified methylated cytosine with phosphorothioate linkage
  modified_base 20: mod_base = OTHER; note = 2'-O-methoxyethyl modified nucleotide
  misc_feature 1..5: note = RNA
  misc_feature 6..15: note = DNA
  misc_feature 16..20: note = RNA
ttcccagaactccctaatca
